United States Patent Application Publication US 2025/0205292 A1 - sequence listing, part 15

SEQ ID NO: 25 - DNA, 2492641 bp, Bifidobacterium longum (residues 1-1,246,321 of 2,492,641)
  source 1..2492641: mol_type = genomic DNA
atggttaacgcttccggcgaccccgtaatcgaggccgcccacatctggtcagacacgctgacggtgctcaaacacagcgcttcgctcagcccacgagaaaaaggatggttggaaggcgttgttcctgaaggcgtcttcggttcgaccatcgtgctgtgtgtggacaacaacgacacgcttcaagccattcagggtgatttgaacgattccctgcttcaggcattgcgtacggtaaccggcgaaaatatgtttcccgcgttcaaggtcgtgccgaaaaccgagcccgaaccgctttcggaggcaaagccggcgcagccatatccttcggaaatttctccgactgtcgccgaattcggtaaagaatcctatggtgcaaagccggcagccgcaccgcgggaaccgatgcccgccaccgagccgcagttcccggtcggtcagcagaagatgaatcgcgatcccgagactcatctcaataagaacttcacgtttgattccttcgtgcccggcgattccaaccgttttgcccgtacggtcgcactggccgtggccgaaggttccgggcaggatttcaacccgttgtgtatctatggcggatcgggcctgggcaaaacccacttgctgaacgccatcggcaactatgcactggtcaaggatcccgggctgaaggttcgatacgtcacgtctgaggaattcacgaacgaattcattgacgcgctgcaaaacccgaaccaaagccagggtcagattgctgaattcaaccgtcgataccgacaggttgatgtgttgcttattgacgatatccagttcctcggcggcaaggaagccaccttggatcagttcttccatacgttcaatgcactgcatcaggcaaataagcgtattgtcattgcttccgatgtagcgcccaagaatttgaagggtttcgaggctcgactcatctcgcgcttcgaatccggcctgaccgtagacgtcaagccgccggatctggagacccgaatcgccattcttcgcatgatcgcctcgatgaacggctcgaaaatccccagcgatgtgttggacctcatcgccgaacgcttcaccgagaacattcgtgaactcgaaggcgcgctaacccgtgttacggccgtggcctcgctgagtaatcagccggtgacccgcgccttggccgagcagacgttgcaggacttcttcaccaccgatgtggaaatcaagcccacggacatcatcagtcaggtggcgaagtacttccacctgacgtttgaggatcttgtcggtaaatcacgaaccaaaaacgtggctgttcctcgtcagatcgccatgtatctggctcgcgaaatgaccagtatgagcctgatggatattggccaggtctttggcggacgcgatcacaccacagtaatgcatgcctgcactcgaatcagtgaccgaatgcagcaaaaacaggagatctataactacgttatggagctcacggttcgcctcaagcaaagcaacaccaactgacacaacgcttctgagagacgaaaaacggcactttttggactgactttccgaaaagtgccgtttttggttgctcaggcggattctggtggatacgtcgaggcaacggattcgagacattagattcctcatggctcccctttgtgaggggatctgtcggcgcagacgactgaggggagtttcgaaggggaacacgcaaaaaaaccatgaaacgagagaatcgattctgaggaccgattttgcgggtttgggcgagcgagacggaaaaagtgccgaaaacggtctccagaatcgattctcctcgacgaaaaacagtcttcaacacgccgtgcgaaagtgcgaaaaccaaaaaagttatccacatagttgtgcacagatgtgggtaaactcggcggataactcgtggattacccactattttgttgtggaaaactcgtgcataaccgcgacctcgatgtggaaaactcaaattcgacgaactggctgtggaaaactcgcccacttatccacaagccatgcagaatttgtccacaattttcagggacttatgaaccgttgcagttgtagggctcagccctacttatccacactatccaccggccttattatggcgattacttactcagttacgtgaaaagcatcatcgccatagtaacagccagtcatccagcgtacgtaagttcgccacccaacggctagaatatttctcagccaatccgacgaagggaacaatcacacatgaaagtcgaaatcgataccgcagccctggccgacgccgtagcctggacctcccgagtcatcgacgcacgtccctccaacccgattctcgctggcgtcaagctggaagccattgacggaacgctgcaattctccgccttcaactacgagatttccgctcgccaccacatcgaagccggcgttgacgaagccggttccgtactggttcagggcaagctgctggccgatatcaccaaatcgctgcgttcggagaaaacgtacctggtcaccgacggctccacgctgaccatcacgtccggcaagtcgaagttcaccttgcagctcatgcccgacaccgagtacccggatctgcctgtggtaccggccatgctcggccaagtcgatgccccgactttcgttcaggcagtgaaccaggcatgcgttgccgtctcccgtgaagaaaaccgcccggtactgaccggcgttcgcatgcaattccaaggcgacaaggtcgtcatgacctccaccgatcgcttccgtttggcccgcgccaccttcacttggactccgcagaacccggacgtcgacaccaccacgctggttcgcggctccctgctcaaggatgtggcccgtgctcttgacgagcaccagaacatccgccttgatttcgacgccgatagcccgacgctgctcggcttcgaaaacgccggccgcgtctccacctcccagctcatcgacggtgaattcccggcggtcgaccgcctgttcgccgacgaatacccgattcaggccgtagtcaacaagcaggatctgctcgacgccatcagccgtgtggctttggtcgccgaacgcaatgctccgattcgcatgaccttcaccggtcaggaagtggcgctgtccgccggatcggtcgacgaggcccaggccaacgaaacactggacatcgacatggatggcgacgacatcaccgtggcattcaacccgtcctacctgaaggagggtctgtccgccgtgaccgaaccattcgtgcgcatcaagatgacgaccccggtcaagccggtcgagttcaacggccagcaggaagctgattccgacgagtccatggactaccgatacctgctcgtgccgatgcgcttcaacaactgagatccctgaatttccaacgattcgctaatgcacatctcccgtctcgcactcgaccactaccgctcatggagtcaggtagtggtcgatttcgtaccaggcgtgaatatcctgttcggcaagaatggcttgggcaaaaccaatctggtggaagccgtcgaagtgctgtccaccggatcgagccatcgcacgtccagcacgttgccgctgatcgaacgcgggcagaccacggccaccatccgcgcgaacgtcgctgatgatgccggtcaaaccactacgtatgaagcgtcaattcatgcgcgtggtgccaaccgagcccgcatcaactcggggtcgtcgctgtatctgcgcgatatcatcggcaagattcccagcgtttccttcactcccgaagatcagcggttggtgtccggcgatccgggagcacgccgcaccatgatgaatcaggctgcggctctgctcgagcccggatacatgcagacgttgcaacagttcacgcgcatcgccaaacagcgtgccacattgttgaagcaattgaatgccaatgccaacaatggccagccgatggatgcggttctgagcggtttggaaatctggaccggccagttcatcgaagccggtgtggcgttgacccgtatgcgcgctcatgtgatcggtctgcttgccgagccatttgccgcgatttacgccgacttggccggtgccggcgagcaggtgacgctcacttatgcgccttcattcgacgaagtgctgatgttcgacgatccgcatccgcagattagcgagcatttccaacgcatctaccctggtgaagtggctcgcggcgtgaaccttatcggtccgcagcgcgatgacatgaaccttgacttggccggtattcccgcccgcgagttcgcttcgaacggcgagatgtggacgatggcgctggccttgaaaatggcattgtttgaaatcgtgcgtgaccggttgggattgcagccgattgtgattctcgatgatgtgttcgcccagcttgacgacagccggcgcacgcagattcttgatttcgccagaaaacaggatcaggtgctgattaccgtggccgctgaaggcgatgtacccgactatgaatcggcccatcgcatcgacgtggccacactggccgaaccagcttccgtgatactgccaactctgggcaatttgtccgattcgcgggaaaacgagagtttgggtaagtatgacggaaaacccgcggtggacagcgcgtccgtagaacggaaagtgtcatgaacccgccgatcgcccgccaactcaacctggacgagaccaaactgccggccgaaatattcgagcggctctcccgtcgcggggcgaccttgaaggactacagacgccgccgtgaagaggccatcgaaaacttcggcaaaccggggcgcgatccggctgaactgggcagcgtgatgaccaccatcgccggcaacggcgtctggacggcgaatatgaagcttgcgcaattgcgcaaccattgggaccaagtggtgggtcaggccatcgccagccattcggcagtcgccgatttcactgacggcgtactgaccatccgcgccgaatccacggtctgggccacgcagctgacctaccttatcccccaactcaccgataccatccgtcgcaatctcaaaggattgaccatcaccgagattcgcgtgaccggcccggccgccggatacacacgcaaatgggctcggcggcggtagccaagataccaaacaaattcgcagaagcctcgctatggcgctcgtcgggttagacgagtaaaatcacatgcagtatggtcaaatggctagaagagccctttacgggcctcgtaagccatatcacctccgtgaatgaccttcatgacggaggtcgaccctgtagtcacggaaggaagcctgttggcagacgaaaccagcaaagaggagcagctgaaggcggctgcggaacgcatcaacaatgcggaattgaccgaaggcgaacttgacgaatccatggcccccgagcattatgaggcctccgatctgagggtgctcgaaggacttgaggccgtgcgtatccgccccggtatgtacatcggttccaccggcccgcgcggtttgcaccacctggtctatgagatcgtcgacaactcggtcgacgaggcgctggccggatacgccagccatatcgagatcaccattctgccggacaacggcatccgtgtggtggacgatggtcgaggtatcccggtcgatgaggtgcccggcgagggcgtctctggtgtggagaccgtgatgaccaagctgcacgccggcggcaagttcggcggcggcggttatgcagtgtccggaggtctgcacggcgtgggcatctccgtggtcaacgcactctccacccgcgtggacatcgaagtgcgccgtcagggcttccactggacccagacgtacatcgaccagcaccccaccgcgcccttgaagcagggcgagccgatgaccgaaggcgagtccaccggtacgtctgtgactttctgggccgacccgaagattttcgagaccaccatctacgacttcgagacgctgcgttcccgcttccagcagatggccttcctgaacaagggcctcaagatcagcctgactgacgagcgtgagaacgaccaggccggcgacgaggtggccggcgacgccgcggacgagcccggcgcaaagcaccagaccgtcacctaccagtacctcaacggcatcaaggactacgtcgactatctggtcaaggtgcgcaaggccacgccggtggaagaggacgtcatcagcttcgaggccgaagacctgaagctcggcatctccgccgaactcgccatgcagtggaccactgcctactccgaggccgtgcacaccttcgcgaacacgatctccaccaccgagggcggtacccacgaggagggcttccgcgccgcgctgacttcgctggtcaaccgttacgcgcgagacaagggcatcctcaaggacaaggacgagaacctctccggcgacgacgtgcgtgaaggcctgaccgccgtgatctccgtcaagctcaccaacccgcagttcgaaggccagaccaagaccaagctcggcaactccgaagccaagaccttcgtgcagcgcgtgatgaccgacaagctcggcgactggttcgacgcccacccggccgaggccaagaacatcatccagaaggccatcgaggcctcccgtgcccgtctggccgccaagaaagcccgcgagaacacccgccgcaagtccatcttcgagtccgccggcatgcccgacaagctcaaggactgccagtcctccaacccggaagagtgcgagctgttcatcgtggagggcgattccgcaggcggctccgccatccagggccgcaacccgatcacgcaggccatcctgccgctgcgaggcaagatcctcaacaccgagcgcgccagcctggaccgcatgatgaagtccgacaccatcgaatcgctgatcaccgcggtcggcggcggctacggcgaggacttcgacatctccaaggtccgctaccacaaggtcatcatcatggccgatgccgatgtggatggtgcgcatatcgccaccctgaacctgacgctgttcttccgctacatgcgcccgatgatcaccgccggctacgtgtacgtggccatgccgccgctgtaccgcctgaagtggaccaagggcccgcacgacttcgtgtacaccgacgccgagcgcgaccgcgtgctcgccgaaggcaaggccaacggacgccagctgcccaagggcgaaggcatccagcgctacaagggtctgggcgagatgagctaccaggagctatgggagaccaccatggaccccgagcaccgcattctgaagcaggtgcacatcgaggacgccgccgcggccgacgagaccttctcgatgctgatgggcgatgaggtcgaaccccgccgcctcttcatccagcgcaacgccaagaacgtgcgttggatcgatgcgtaacggaatcctccaacctccctcgtcagagggaggtacacaacggacttagacaactaaaggaacaacagtggcagatgaaaacaacaccggcgacgagcagttcacgccggacggctcgatggagccgttgagcccgcaggaggcggacactaccgactacggcctgatggacaccggcgaacgcatccagcgcaaggacctgcagcaggagatgcgcgagtcctatctggcgtatgccctctccgtgatcgtcgagcgcgccctgccggacgtgcgcgacggtatgaagcccgtgcatcgccgcgtgatctacgcgatgtacgacggcggctaccgccccgatcgcggctacaacaagtgctcccgcgtggtcggcgacgtgatgggtaagtaccacccgcacggcgactccgccatctacgacactttggtgcgtatggcccagtcctggtcgatgcgcaacatgctcgtcgacggccagggcaacttcggctcccccggcgacgacccggccgccgccatgcgttacaccgaatgccgtatggccccgctggccatggaaatggtgcgcgacatcgacaaggacaccgtcgacttcgtgcccaactacgacggcaagacccaggagccgaccgtgctgccggcccgcttcccgaacctgctcgtcaacggctccgccggcatcgccgtcggcatggccaccaacatcccgccgcacaacatgcgcgaggtggcggacggcgtccactgggcgctcgaccacccggacgccagccgcgaggaactgctggaaaacctgatccgcatcatcaagggaccggacttccccaccggcgccaccatcctcggccacaagggcatcgaacaggcctaccgcaccggccgtggcctgatcaccatgcgtgccgtggtcaacactgaggagatcaacggccgtatgtgcctggtggtcaccgaactgccctaccaggtcaacccggaccgcctcgtcgtctccattcgtgaggccgtgcgcgacggcaagatccagggcatcgccgacatgcgcgacgagacctccggccgtaccggccagcgcctcgtgctcgtgctcaagcgcgacgccgtgccgaaggtggtcctgaacaacctgtacaagcactcccagctgcagcagaccttcggcgccaacatgctggcgctggtcgacggcgtgccgcgcacgctgagcctggacgccttcatccgccattgggtgaaccaccagctcgacgtgatcgcccgccgcaccgcgtacctgaagcgcgaggccgaagagcgcgaccacatcctgcagggctatctgaaggccctcgacatgctggacgaggtcatcgccctcatccgtgcctccgaagacaccgacaccgcacgtacgggccttatggggctgctggacatcgaccaggtgcaggcggacgccatcctggccatgcagctgcgcacgctgacccgcatgaaccgcgacaagatcgtggccgagcatgaggaattgcagcgcaagatcgccgactacatcgacatcctcgccaagccggaacgccagcgcaagatcatcggcgacgagctcgacgagatcgtcgccaagtacggcgacgaccgccgcaccaagatcctgccgttctccggcgagatgaacgtcgaagacctgatcgccgaagagaacgtggtggtcaccgtgacccactccggcttcattaagcgcaccaaggccgacgaataccgctcccagcaccgcggcggcaagggcatcaagggcaccaagctgcgcgaggacgacgtggtggatcacttcttcctgacctccacgcacaactggctgctgttcttcacgaacaagggccgcgtgtaccgcatcaaggcctacgagctgcccgagggctcgcgcgactccaagggccagcacgtggccaacctgctgcagttcgcgcctgatgagtccatccagaccgtgctgtccatcccgaactacgaggtggccaagtatctggtgctcgccacccgttccggcaaggtcaagaagaccccgctggccgagtacgattccccgcgccagggcggcctgatcgccgtgcgcctcatggccgacgagaacggcgagaacgccgacgagctcatcggcgccgcgctgtgcaacgccgaggacgacatcatcctggtctccaaactcggcatgagcctcaagttccaggccgacgacgagcagctgcgcccgatgggccgccagaccgccggcgtgcagggcatgaagttccgtaacgacgacagcctgctggccatggatgtggtccctggcgactccgacaaggacctgttcgtggtcaccaacgagggcttcgccaagcgcaccgccatcagcgaataccgtctgcagggccgcaatggcctgggtatcaaggccgtgcaactggtcgagggccgtggtgccctggtcggcgcgctcgtggtgtccgaagacgatcaggtcatggccatcatgaagtccggcaaggtgattcgctccaacgtggacgaagtcaagcgcaccgggcgcaacacccagggcgtgacctttgccaagcccgacaagggcgacacgattctctccatcgcccgtaacgaggagaaggacgagcccgaggatggcggcgatgccgcggcgaacggcaccgccgagaccgcacaatccggcgagaatgtgaacaacgcggacgaggcgtgagcagcgtcctgaaaagctggtagcctcgcatacagcagaggctaccgccaagcctgttaaggagaaacgatgagcgagaatctcgaagacaacgagccccggatcataccgacggcagtcggcaatacgcagaacgagcatgtcgagccgctgatcggtactgagcacgctccccgcgtggcacgctccgtgtccagcgatccggaagaatccgcgttgccttcttcaggtgccgccactcccgtgcgtccggcacctcgccgtagcgcccccagggctcgccgcatgagcttgtcgctgacccgcgtggatgcttggtccgtggccaaggtgacgttcatgctgtccatcgccgtggcgattattcaggtcgttgcctccgcgatcgtatgggtgctgcttgatgtggtcggtgtattcagccagattacgcagattgtgtcttccaccggtcttgatgcaggcggtttcgatctcaagaacgtgttgtcccttaccaccgtggtctccggcgtcaccatcttctcgattgtcgaagtggtgatcttcactctgctggccaccattgcggcactgatctacaacgtggtcagctctctggtcggcggtgtgcacgttacgctcggcgacgactgatatagctatactgacggaactctcctcagtgaaccgcaccccggttgttggactgaagtaattcagattcgatgatcggaggtgcggtttcttatgtgtggggatcgcaggcgtcgttgctgggccgagacttgggactccggcgacgctgggggtggcaggcgtcggtgttgggacagattttgtatctctgacgacgctgtggagggcttaccgtcgtcagcggtacagatcttggagttctgccgacgctgagggtgcgttctgtgtcgtatgcgtccaattcttggccctctgccgacgctgggcacagcaagcgtcgttgctgggccaagttttggactgccgccgacgcagagaatgcacacagtggtgttggtctgccagcgtgtggcagcttggcgccgctgaggaaggtctatgtggtgtggttccgccaaaggactggcaggttggcgctactgaggggactttatgggctcttccggttttggcgtgtaggggccgtgcggtttcattcactttttcaatcacacaccgaatcaaaccgcacggcccctacgcaccaaaatgcgaagagccggtttcgctaactagtgcctatatgcctgcaatcaggctgatttgtgctgtcaggctggctggcgtcagcggttgatctgccgatgttgctgctcgtcagtctggactgttgggctttcgttttgacagcggaaggaagatcctcctcgcggtagggcaacaattatcagtatcataattaaggtaatcgtgattacattaaccatgatactcttattattgggcagtaggcggatcggagggctgcaatgtttgtcgcacgagagcacgagttacaagtgctggaaaagctgtttaccagcgattcgttcgaaatggtggtgctgtacggtagacggcgtgtagggaaaacggcgttgatcgacgaatttgtcaaagataaacgcgtgctgtacttcacggccatacagcaaagcgccaagatgaatcttgaagatttctcaagagcggcattgtcgttctttggtatgccggattccaccccgtcgtttggcgggtggtctgatgcgttatcgtttgttgctgaacgtgctgcacagactgacgaacgtatggtgttcgtattcgatgagttcccttatgcagctgccgccgagccagcattaccctccatgttgcagatagcaattgaccatggattcctcgccacaaaagtgacgatgattctatccggtagtaacgagggattcatggaaaacgacgtattggggcgtaaaagcccgctatacgggcgtcgtacagcacagattcgactcctgccattcgactatgcggatgcggcaaaatttctaacgaacacatctccgcaagaactggtccaatactatgcgactttcggcggtacgccatattatctggcccgtatacaggaagccgatggctttgaatccaatgtgctgcgcttgatgttcgacaacttgggcgtactgcgtgaggaacctatgatgctgttgcgtcaggagcttcgtgaaccggcatcgtattattcgatattgcaatctattgcgggtggtaattcctcgccaaagcttatcgctgaacatgcgggtgtcggatctgattcgattggagcatatctgaaaacgctggtcgatttgcgcttaattgagcgaaaagtgccgtttggtgaagatccgagtaaatcgcgcaagggaatgtatgtggtgagcgatcccttctttgcatattggttccgctttgtggggcgcaacatgagcattttggatggtaatatcagcgaggaggttacgagcagactcgcttttggaccagcgtttgatacctatgttggtcaacaatttgagacgatttgcctgcaatggcttattcgaaacaacgctatgggcaacctcccctttgttgccactcagttcggcaaatggtggggcaatgatccgattgctcacgagcaaaccgatatcgatgtgattgctgcggattcgctcgataaaacgattctgttcggtgaatgcaaatggcgtaattcattcaacgaaacggaggctattgaaaagctccatcagcgtgctggcttagtccgcggctatcaggcaggtaatgcgtggcttatgctgttcaccaagaatccggtgagtgagtccacgcgaacccgctacatggatgatgaacgaatggtgttcgtttccgcggaagagttatacactgcgtgatgcattactgggtgattgtgacgcggtatctagagtcctgccgacaaccacgtggcaattacgccgaatcacgcaccaccaaatcggtgttcaggtgcatcacgcgcggtgaagagactccgttgatggctttgatgaccacgtcggccatggtccagcgcgctgatccatgtgctgatcgacggtggtgagttccggggttatggaggtggaagctaagttgttatcgggcttacgtatttggggatagcacttgttgctcgttgtacatatagcaatgcccttgcctcctcacgggaagcaagggcattacgctactgcttagtactgctcagtggcaagcgtcacagcacgccctgggcaaccatggcgttggcgaccttgacgaagcctgcggcgttggcaccgagcatcaggtcaccctcgtgaccgtattccttggcggcggccagggagttggcgacgatttcttccatgatggacttgagcttggcgtcgacctcttcgaaggtccaagacaggcggtagctgttctggctcatctccaggccggagacggccacgccaccggcgttggcagccttggccgggccgtacagcacgccgttcttctggtagacctcgatggcctccggggtggacggcatgttcgcaccctcgacgaccacggtcacgccgttgtccacgagcttctgtgcggattcgccatcaacctcgttctgggtggcgcacggcagagcgatgtcgcccttgacggtccacacgcccttgctgccctcgtggtactcggagcccggaacgcgctcggcgtattccttgatgcggccgcgctcgacttccttgatctgcttgacgacctcgacgttgatgccgttcgggtcgtagatgtagccgttggagtcggagacggtgacgaccttggcgcccaactgctcagccttctgagcggcgtaggtggccacgttgccggagccggagatcacgacggtcttgccctcgaaggagtcgttgcgcagcacgcgcagggcttcctgggtgtagtagcacacgccgtaaccggtggcctcggtgcgggccagggagccgccgaattccagacccttaccggtcaggacgccggagtactcgtcgcggatgcgcttgtactggccgaacaggtagccgatctcacgaccaccgacgttgatgtcgccggcgggaacgtcggtgaactggccgatgtggcggctcagctcagtcatgaaggcctggcagaagcgcatgacctcagcgtcggacttgcccttcgggttgaagtcggaaccgcccttgccgccgcccatcggcagcgtggtcagggagttcttgagaatctgctcgaagccaaggaacttgacgacggactcggtcacggtcgggtggaagcgtagtccgcccttgtacgggccaatggcggagttgaactggatacggtagccgcggttcacctgaaccttgccctcgtcgtcaacccaggccacgcggaacttgatggtgcgctccggctcgacgatgcgctccagtacaccggccttctcgtactccgggtgcttctcgacaaccggctgcagggtctcgaagacctcgcgaacggcttgcaggaactccggctgatcgccgtcacgggcaacgacctggtcgtagacacgcttgatgtactcgtcagtgagcatgattctcctcgatttgctagggaattaagacggttttattctatgcgcgcaggcccttgctgcatagagtctcgctcggataacgggaaagctatcggcgtggttatggggtggttcaagtttccgtttgttagatttttcggcgattgctggatgtctgtctgtgcgtgaatcgggtcgaaatggaagctgcatcacaccgaaggtgcgttcatatagtggacataaaggtggacttgggtgatgtcggatgtgcccgttgggaatcgtgcgccgtaggggccgaggtcttcggcgcgcaggttaccgggttcgcggtcagtgcgcgaagtaggtctgcagaatcatcgtggtctcggtgcttaccggcaccgtgcggtggatgagattgagcaattcctcaagggcggtgggggaggccacgcgtaccaccagtacgaagctgggggcgccggccaccgaatagcaggagacgatgccgtcgatattgttcagcttgtccggaatcgaggattcggctgagtagtcgagcggggtcacgttgacgaacgcgctgatgggcaagccgcgctgctcttggtcgatgatggccttgtatcccttgatgatgccgcgcttctccagcttctgcacgcgcgactgggcggcggagacggacagtccggtcgcctgggccagttgcgcgagcgtggcgcggccgtcggcctccagcatggtgaggatgcgctggtcggtctcgtcaatcgcggtcatggtgtcttctccgttcgttgtgctctgtgttcactgtacctgttgccggaatgcgatggctttccgattttgcctggtaatttcagtagttcttcctgtgttttctgttgtgtggtggaatgtttatgcctaaagtcctaattgaatgtaataattccttctgaaataagagaacgacgaaataattccattgaggagggatgatatgcagaagttttccaacatgcctctgtccgaagttgcatctgctgctgtgcctgctgccagacgggttgctgtgccgaccgccaagcccgcgagcttgtccgccgaagccctgaatatcccgcgctccggcatccgagacgtattcgaccgtgtagagcgcgtgcctgacgcgatttcactgaccgtgggggagcccagcgccacggccgcgccgcatatcgtggcggccgcttgcgaggccgcacaggctggccgcactcggtacaccaacgtgctcggcgtccccgaataccgcaaggccgtggccgattactccgcccgtgtgaagggactcacttatgatcccgaaaccgagattcaagccgttgacggtgccacgattggcctgtttctggcgctgaaagccgtggtaggcaccggcgatgaagtgattattccctcgccgttcttcacttcctatgacgccgaagtgatgctgtgcggcggccgcccggtcaccgtggcgctgcgtccggagcacggcatgcgcgtgaacgcggcggacatcgaagcggcgatcaccccgcgcacccgcgccgtaatcatcaactcacccggcaatccgaccggcgcggtaacttctgccgctgaactggcgcgtattgccgaagtatgcaagcagcacaatatttgggccatctccgacgaggtttaccatccgttcgtgtttggggaaacgttcggggaaacgcttgggggagaggcagccgtggcaccatcgattgccgcggtgccgggcatgaaagaccgcaccattgtggtggaaagcctgtcgaaaacctacgcgatgaccggctggcgcatcggctacctgctggcacccgaagcggtcatcgaacagaccggtaaaatcgccgaactcatgcactcctcggtgaactccttggcgcaatacgcaggcgtggcagcactggccggtccgcaggatcatgtggccgccatgcgcgaggaataccgcgccaagcgccagatcgtgctggacggtctggccggatgcccggtattgcgcttgattgaaccgcaaggtgcgttctacgcctttgtggacgtacgcctgactggccttgactccggtgaattcgcagaccgtctgctggacgaagagcacgtggccgtggtccccggcgaggccttcggcgaggaggggcgcggcttcgtgcgcctctcctacgccggagatgccggcgagctgcgtgagggcgtcgcccgtctgcgcgcattcgccgaacgggtatggaaccccatcaccggacaccacaccgccacttatcaccccatggaggtgttggcctgaggcttaaagcgaggctaggccgccaattcggcctcgtcggcgcgagcgatggcctgctcgtaatccttggtgcctttgaacacttccttggtccacgggttgatgccctgcttcttggcgcgtagcaggatgtagccaagtgccagcacattggccgccaacgcgattaacgagactgcaaggttcacattcggattgttcacggactgggtggagaacatggaatagtcctggaacatcgggaacacctgcgcgaacatgcaccagatggccagcgtgttggcgcggttctgaatccaaccgcccttgttccagaagaagttggccacggtgggtgccagcagcagcgccaggccgcaataccaggcgtgggtgggcaggcagttgtaggtgtagcagaagttccacaggtcgtaggccacgatgaacacccaggtcatgtccggccagagcatgtcgtccttcttcttggaggcgtagatgccgaaccagccggtcatgcagaagatgttgagcaggccggccacgccgttgaagacgttgtgccagccaccgtacagggtcacgccttcggtggagatccacgtggtgccccagccgcggatggcggattcgaagtcggacactacggcaatgaggatgttgatggccacgatcacgaacgggaagcacttgaaccagtgcgatttgccgatggatccccacttgtatttgagggccatgaaaccgatgcagccgatggtggccgcgtacagcttggcatagtggaaccagctggtcatgtgtacgtaggtcgggttgttgagggcccagtcggcacccatggcggcggccgtgtagatggtgatgaagtagacggtcagcacggccggtatgacgaggaaggcgataacgccaccggttttggtgcggcgggccagttcgttggcgccgataagacagcagaagacgagtatccatccgatccattggtagatggcgttgtcgccgtagacctgaaacagcataagcggtcctttccgtgtgtgcgctgtgcgcctcgcagtcctccattgggttgctgagacgcctatagacgccgctatgttgacgcagcgtcaatttctctcacggcacagtctagcctcaagttgacatcgcgtcaaaacaaccgcattaaggctgccgcgtctcgtatcgttacgcgtaggggctggctgaggcgtaatgctgaagagtaacattgaagcaatggcaatcaagccgatttgaggaagagaagcacacgatggcgtactgcggccactgcggaaatagagttgataggccggcacgattttgcccggcatgtggagcgtctgtagacagcgcaccggttgcgtctgtaccagtgccggccgcatcgtcagccgtaccgactgcgtcgataccggcacctgctgtgccagcgccttcagtaccaccatcgataccagccgcgccggttgccccatcggtttacgccgcgcccgctgccccacagccggcaccaactgctcccttgccagctttgccgattcccgctcctgccgcatatcaggcgactgatgcaaccgccgtcctggcaccgccgcgcaaatccagcaagaagctgatcgccgttctctgcgcattgcttgcgacgattctggtggcggccttggcattcatcgtccccaacttcaccgccgtcaaagcgatgctgggcttccagcccaccaatccgctggtcgtcaccttcgacgcgatcaactcgctgtccactctgcgcagcaccaaatacgaactcagaacccacagcagcactgacgactcccttgacgcgcggatgtctggcatgtattcgctggggcaaaaccaccaatgactcctccgcgtctgtgaccatcaagacagatgaacaggcaacaaccctcgcttggcacaaaggcgcattcgccgggaaaaacgtttggtatgatgacgacccctactacatctactacccggccgaccaatatgaagatgacttaaggaacggcgttggtagtgatgtggcggacttgatattgaacgtcaaggatgcgttggtcaagaacggtgcttgggacatcaccggcgcggagcgaacgttctacgatcagctggacaagatgaacgacgatgggtactcgaacgacatcgaccgggccaagggcacgaaaacgtctgccgaggtgaaggccgaggccagcaaattcatccaacaatatctcggcgtggagctggaagataagaatgtgcgcagccagctgttcccgaatacatcgtctgccaagtctgccggcaacacgcagctctcgtatcaaatcgatgtcaaggcattggcccagcactttgtgaattactggatcagccatgaagcgcagtatccgcatctgaaatcatgggtgattcagcagatcgaggataccggtgtgggcgatgctgaaggcgagtaccgtcaggcgctcgacaatgtgcgcaactgggacttcggcacggatgaagagccggatatgccgactatcaccgtggatctgaactacggcaggaagcatctgatgagctcgattgccgtaagcgtgtccggcaaggacgaatacggcgactcctacaaaggttcgctgtcgttgacgctcagccagcagaacgcggtgtctgtggacgaccccgatttgactgatacggtgagcaaagccaaggacaacaacgagctggatctgtcttgagcagaatcagaatgtgcggaacgccgtgaacagatcatcgacgtgacgtcgcatgtgattcacagaacgggttttggggcttttccgttcgtcaggtagccgaagcatgcggattgaccgagccggcggtcatataccatttcaagaacaaagtcggcttgctgattgccgtgctggagcatcgtgatcgggaagatatggctacgtttgcccattctcttggcgttgaacctgaggatatgtggagcggcaacgcgcagttcggcattcgtgatatctgtgctgcccttatggagcgcaatgcggctcagccagagatggtgcggttgtatataccgtgctacaaggcgaatcgttgaacgagcatcatcctgcctatgagtattaccaaaaacgagaacatcgcgtgatggacaccttaacccgagcagtcgagcgtgacggtttggcagatcctcgtcgcgaggcgcggactgctttgtcgatgatgaacggcattcgggtccgtttggctcagggatcgggcatcggtcgatttagtggccgattggaatgcctatgccgacttccggtggcctcgacagtcgtgaggcaataagacttttctcgtgagatacgctatcggcgtgtcgtcatctttttgttgcaatacgcagaaaatgcaagaacaaaaacccttggaatcggactgattccaagggttttgttgtgtctgtggagctagccgggttcgaaccggcgaccctctgcttgcaaagcagatgcgctaccagctgcgctatagccccgtgagaaaaaaagagcggctcgcggccgcttcatttttcctgtgggcccgggaggacttgaacctccgacctcatccttatcagggatgcgctctaaccagctgagctacgggcccgatccatacgcttcaaaagcgcacaagtgattacaataccattgaacggcggtatgtcaataacggcgtgtcgcgattgtcgcttgcgccatgattgccggcgcagcggagcatgacgagtgcgatgaggctgttcgcgtggtggaagccgtaggccatgcggatggtgaccttgatcctgttgtcggacgcctcgagcctggcgttggagtagcccagctcgatggtcctgaggatgtcgggccacgacggcggatcttccgggatggcttgccgctctcgtacaactgcacgatctgccgtttgaacgcctcgtcgtagtggcggggatgtttcgggtcggccatcgtcggcctccaatctcatgtcattcgtccctcatcggactgtctaatacgttgtagccaatccacggcgtcacatcgtcaggctgtccgggtcgaggaggaaatcgtagacgctcatcgtgaggatgccgtgctcgtcgcggacgggtttgaccacgtcgcgtacgaggacgatcttctggaagctgtcgtcgatctcgagcagcgaggcttctcctgcgcgaccttctccggtgtgggcagttggtacgcggattggtcagggcgccgatggaggaggccagcacgtcgaccaggtcgtcgagctcctgcgacctgcgcagcccgttgcgcatgcgcagcagcccgttgatcaccccgtacagacggggcggctcctcgccgcgcgtacgaacgcagttcatgaagaattacgagtgattcgtcgaagtcttcggcgttacggccgccgcctgagccagggcggcggccacttgttcgttgacggctccctgctgtgcgatggtgacgcggatgcctcgactggcatgcgcgtccacgcccgcaccggcccccgcgtcggctccggtggcgtcggcgctgatacgcaggctcggcaggaacggcttgccggcggccacacggatgccctgttcggccagcagtcgcagcgccgccggctcgtcgcgcaccggaatccacagattcagtccgtcaccggtatgcacgtccaaactttgacgcagcagcagcgcgtgcatcgtcttttgccgggtggcgtagatatgccgggcgttggtcaccgtgtggaacgcctctttgtcggccagcatttcatacagaatctcttgcaggaaccggctcacccatcccgatcccaagcgtcgttgggtgataatcgcctccacggcatcctccggcccagacagcgcagccaagcgcagatccggcccgtgcgacttcgaaaaactgcggatatgcaccacgtgttgcggcaatcgttgcgccaacgatgtcgcatacgcattggccacatcgccactgtgatcgtcttccacaatcagcggcataccaacgccattcgggtagtgcgcgagcagcacgtccgccaaagcgtcgatgcgttgcgggctgaagctggccccggtagggttctgggcgcgcggctgcagcaggatcatactgacctgatggccgccgtgcggcaccgccaggcgctgcgattccagcatggtcagcgcacggtcgagtgcgtcgggcagcataccgaacccgtccatcggcacgccgaacgccatcgcgccatgtgcctcgatcatgtcgagaatcagcggatattccggtgcctcggtaatcacaaaatcacccggctgaacaaaagcgttcatggtgtgcgccaaaccgtcgcccgcgccggatgccatagtcatcgcctccggctcatacggccagttgcgtcgcaaaatctgttccagcatgggcaggatggtcggcccgtcgtatgaattgacgaatgccttgtgcgtgccgagcttgccgagaaacgggcggatgtccggcagcagcgaaaggtccggcgtgcccttggacaggtcgataatcggtcggtccggcgcggtggccggggcttcggccagcaagtcgccggcatcgtagcgatgcgtgcgcgactgccgcagtacgaatgttccggcgcgcccgcgggagcgcagtatgccggacctggcgagggcatggtaggcactggagacggtggccggactggtgcgtagcagtcgggcgagatcgcgtacggtgggcatgcgctggccttccgcaagtatgccggaggaggtcagcgaggtgaccgattcgacgatgcgttgcggggtggccgtcgcctcggtggtgaggatgagtgaggataactggccggcatcaacggccaggtcgtcggtggaacgcaggggagcggccgtaatgcttggctcatcgttgtagccgacggcatgtgcggttgttgatgcggttgatggcgatggcgtatccatgatctgcctcccggatcttggcggcgagcgtgatgagcgcgcgtctgcgtgaatgttgccgattgccgccggctgatgatcgatggcggttgccggcttgttgctggctgcttgactgccgatagtaacggtcactgtggcaacggtagtcaaatgttagcgccgcattgtgcaatgagtatgtttttgaataacataaacattacataatctggatacaattattgttcttgttcctatgtttcaaaatgatttcgtattcgccactactgtaacattattaaatgttcgagtttgacgcgaaatgttcaactctcataatgacattcacagcgcgttgctgccctgacccgatccacgggagacggcatcgggcacttcgagaaaatatcgaggaaaggacacatcatggggcgtgatctttcgcgggatgcggaaatctgggacgacgcttacaagctggaccgcgcacacgtattccattcgtggcacgcacagcgcaacctggatcccactgaagtggtaaccggtcacggcgtgtggctgaagtacggcgacggccgtgaaatgctcgacttcaccagccagcaggtcaacgtcaacatcggctaccagcacccgaaggtgatcgagggcatcaagaagcaagcggaactcctgtgcaccatcggacctgactacgcgaacctagcccgtggccgcgccgcctccctggtggcccgccgcgctccggaaggcttcgacaaggtgttcttcaccaacgccggcgccgacgccaatgaaaacgcgatgcgcgccgcccgcctgttcaccggccgcgacaagattctgtcttcctaccgctgctaccacggcaacaccggtgcggccatcagcgccaccggtgactggcgccgtaagcccaacgactactctcgcggccacgtgcacttcttcaccccgtacctgtatcgctccgagttttccgcaaccatccaggaagaggagtgcgagcgtgcgctggctcacctcgagcacgtgatccagttcgagggcccggacaccatcgccgccgtgctgctcgaatccgtgccgggcgccgcaggcatcatcattccgcccaaggactacttcaagggcgtgcgcgagatcaccaagaagtacagcatcctgatgatcaccgacgaggtcatggccggcttcggccgcaccggcttctggttcgcactcgacgactacgactacacgccggacatcatctccttcgccaagggctgcaactccggttacgtgcccgccggcggcgtgattatgagcgacccggtggcccaccgcttcgacgacatcgtcttccccggcggcctgacctactccggtcacccgctggccatgggcgccatcgtggccacccaggaagccatggaagaggagcacatcgtcgacaacgcctacaccatcggcaaggacgtgctcggcccgcagctcaccgctctgtacgacaagcacccgaagatcggcgaggttcgcggcaagggcgtgttctgggccgtggaaatggttgccgaccgcaccaccaaggagccgctggacgacgccacgatgaagcagatcgtggccgaaggcgacaagcgcggcctgattctcggcgtgcacaacaaccgcatccacgtcactcctccttgcgtcatctccgccgacgaggcgacccagggcgtcgagatcctcgaccaggtgctgaccgcggccggttgctgattgggtgactcaatggctcggtgacggtttgtagccgttgccgacagcaccgttcattgctgatggcggcccgttcggaacgttaggttccgggcgggccgccatcgttgtccgccgttgtgcgagaatgacttgcgtgccttatcgccgtcgtcaatccaccgctccgaagtccggtgcgccgaaatccgttcggtccgctgccgccgggcagtcgttggatattgatggcatccatctgcacctgacgcgcaaacccatcaaaaacctgtatctgcgcatcaaaccgccgagcggccgcgtcgaaatctccgcaccgatgcggatgagcgagagtcgcattgcggatttcgtcaaagagcgacattcgtggattctcgcccagcagcagcgcatggctgaggcgcaacggcgctccatcatggcattgaacgagggcgccggcttcgagaacggaggtcgtggtgtagctggtgccagcggccatgatggaggcgttgccggtcgtccgaaaaccggtgatatcagtcgtccgggaattggtgacgccgggccaggccaagccggtacgaatgtccaaccgtattttgaccgctcccaaatctggaccgacgaacgcaaacgacaagcggcggccgcgatcaacgccgcgttgccacagctgctggccaagtgggggccggtcatcggccggcagcccacgcatatcacgctacgggtcatgacctcgcgctggggatcgtgtacaccgcgaaccggccgcatccgtctgaaccttcaattgggactgatggaaccgcaattcctggaatacgtcttggtccatgagatgacgcatctgtgggaaagcggccatggtgccggattccaacgccgcatgaccgcctacctacccggctggaagacgctacgtcgcgacctcaaccgccgcgtggtgctgtgatgatgacgggtcaggcttcagtgccggcgatgtggctgatggcctgatcggattcgttcgcatggtccgaatgcgccaccatctcgatggccgccggacacccgctcaccgacgaagaccgctggccttggctcgacaccatcgccgcgtggatcgacgagcgtgtggccgccggcgagcccgccgtggtcacctgctcggcgttgaagaagatctaccgcgacaagctgcgccgtcaaggcgtggtgttcgtctacatgcagggcacattcgacgaggtgatggaacgcctttcccaccgccaaggccacttcatgaagccgagcatgctgcaatcccagtccgacattctcgaagagccgggcgatgacgaaattcacgtcaacgtacacatcggccaggccgatcccgaacacgaggccatggccgtggccggtgccctcggcctgtgagccatctctcggctccccttagtctcacttcgccacacgtgcggcgcatcgacgaactcgaacggcgcatcagcgaacttcagctggagctgaagcagtgtgaaggccagcaagggcgaaccggatcggtccaaacgggctactcaggccgaccagcccagccagtccgttcagaccgacctaactgatcagagcgggccctctgaccagtccgaaccatctgaccgacatgtacttgttgactaagtgtgcggcccgtcattcgttatggaacatgccggccatgtatacaggcaggtaggttacattcccttcgactgagacgttgcacgggccaagcacatagcctgtattgagatggtattcagggtgggcgagcacgttgtccattgcgcgatggcgtttgtaggatttgccggacttcacctcaatcggcagcacgtgatcgttgcggtcttggatgaggaaatcgagctcgccaagcttcttactgttgtagtagtacaggtcaaatccgtgagcgcgtagctcttgggccaccgcattttcatagattgaaccgtagttgatatcagggttgccgtcgagtacgtcgagcgcggttttcttgagaaacgagccggtaagcagacccacgtcgttgtaaaagagtttgaagaggttacgttccttgctcatctccaacggtgtgcacggttcgtccacgttgtacgcggcgacggctacatccgcattgaccagccaatcgaaatcggaagcaaccgattggaatctcatgttcttttcgattttggcgaaggtaaagcgcttgtttgggttatttaactcgctgggcaccaaatcgtagatagcgcggatatgcagccggtcttctttgcgcgcgtattggctgatatcgcggcgatattcacgctttatgttctcttgtatagtgcgcacgtccgcaacgctgccgtttgccacgaacgagtcgactgcggcaggcatgccgccgatgaccagatatttggagtatagctccatgagcctttgatgaatgaactcatccacttcctggtgcttggcaaagcattcggcaagcatatcgaatacgtcgttgccgatatgctgcgaccagcagaactcttggaaatccagtggatacatatccagctcggtcaggtacccgaccggtaccgagcgtatatcttcgagctcgactccaagtagcgagccggaaagcgcgtaatcgaaccgaccatcatctacaaggaacttaattgcggtgaccatttccttgcaacgctggacctcgtcaaagaaaatcagggttttgccgggtactaatggcgtatttacggccagttccagcctcatcagtaggtttttggcatcgcggggccgatcgaataatgcaacgaggtcagggttctcgatgaaattgagctcggcgatatggtcgtaatgctgttgggcaaagtgcctgatgatataggttttgccaatctgacgggctccggtgaccagcagtgcagtgcgtttcggcgcggatctccaagcttccagctgtgtctcgatttttcttcgcagcatgagaatctccagtcatttgtaggccttgcatctatgctgggcacgttttccaactgtttatagcgcatattttacacttttccaaccataagaatgcggttttggctacgttttccaacctcaaaatggggagttttatacacttttccaacttatgtatgtggagactctctatttcacgtgagacgaaagtggctcccctctttgaggggagccacggaatacggcttttacttatgccaggtgagagcgcatgaaccactggaacttttcgagttcctgcacgtggtcctggatgatgttggagctgatcacatccagctcgtccagctcggcgatggccttgcggtcgtcggcgatgaaggcgtcgtagtactcgatcagcgccttgagatactcctcggtgcccacgcggccctcagcgtcgaacgatttccacgtgcggttgcgcacgatggcgtcagcacggccatccggggtgccgcccagagtggcaatgcgctcggcggtctcgtcggcctgggccagcacggcctcgacctcggggtcaagcatctcgtgaacggcgatgaagttcgggccggtcacgttccagtgtgcgtgcttcaggaccagagcggcctcctgctcctggctcagtcggttctgcaggatggcgatggccttctcactggccgcttcatcaaggcccggcacaacaaatgcaagtgtcataatgttccttctttcagtaggtggaacgttgccctttcattctacgttttttggttatgccccgggccgaacgaataggtggtgaatatcacgcgactatttggcatcgtcgctttgtgattcggccggcagcggcgcatggtccggggcgccggctttgcggacttcgatggtttcgatgcggcggccatccaccttggtgacgaccatgttgtagccgtcgtcggaatgcagcacgtcgcctaccgctcccatcttgccggtcttggacaggaagtagccggcgaccgtctcgtacgggccgtcctccaattcgatgccggtcagatcggcgaagtcctcaatggtcatgctggcctcgatcgtggccacaccattgacgaacgcggtgcgggtggtgcgttcgccgcccttctcgctgggcagatcgtactcatcgcgaatatcgcccacaagctcctcggtcatatcctcaagcgtcacgatgccgtccgtgccgccgtactcgtcgatgaccacggccagatggatgccgcgcttacgcagcagttccaggcttggcagcagcttggaggtgccgggcagggagatgccttcgcgcaccacatcgcgcacgatcttggcgttcggatcgcgcacgtccagcagatcgcgcacatgcacgaagccgatcacgtcgtcgaaatccttgccggtcaccgggtaacgggagtacggctggtcgcgtacgaacgcggcggcctcggccaagggctggtcgccctcgatgaagaccacgtcggcacgtgggcgcatcacctcggcgacgatggtttcggacgcgtcgaacacatcgtccagaatcgtgcgttcgtccttggaaaggttggtgttggagctgaccagcacgcgcagctcgtcgtcggacacctcggactcggtctgctgcgggtcgaagccgagcaggcggacgatgccgttcgtgttcttgccgatgagccagatgatcgggcggcagacggcggcgaaggcgtcgatggcgggcaccacggcgcgcgcgatctgctcggtgcgctgcatggcgatgcgcttgggcaccatctcggagatcacgatggaacagtaggagatgatgagggtcaggatgatgttcaccaggccgccggcgatgccggggtgcacgccccagctttcgaccgccggaatcaggtagggggcgatggaagaggcgccgaacgaggcggacaggaagccggagagcgtcacgccgatctgcacggtggacaggaaggtgttcgggtcacgtgcgattttggcgactttggcgccgcgagcgtcctcctgctccatttgctcgatctgcgagccgcgcagagagaccaatgccaactcggtgccggagaacacggaaccgataacgagaaatacaaaaatcaggaggatgttcaaaccaagtgacatggcttcaactctaggggagtggcacgtcaaattggggtgtgctggctgggcagtaagaaactcggcaaagggaagggcactcttatcattactgcggccgacgtgtcgaccggtgtttccgatgcgttgctcgccttcgacgatgccgtatgcgctccagcgctggacggcattactagtgcagagaggctgtttctcgcggctatggccaaggattcgccaaatcccacgcaggttggcgatgttgcggatcgcacgctcagaagctcagcacttctactttgccggaatcgagctgatagcgggcgccgacgatcatgagcttgtcagcggcgagggcctgctggatgacaggagactgctccaccaaagtttcaataatgtgggccacatgcacgcgctcgatgtcttcatgcgcgtcgagctcggcttcgcgcgcctgccagacggacatgccggcctggcgcagaataatcgattcggcggcggcgatgtgctcgtcgaggtcgtccatcgcatccgcggcctccagtgagccgtcggcttcggaagtgatggtgtgcatcaggtcgtccagctcctgctcggcggcctcgattgcgccgcagtgctcgtgaccgagcacacagatcaggctgacgtgcagtttcttgaccgcgtactccagcgaggcgataaccgcgctatcgatgagttgcccggcggtgcgcacggtgaacaggtcgcccaggccctgatcaaaaatgatttccggaggtacgcgcgagtccgagcaggagagcaccgcggcatccgggttctggccatcaagcaacgtttgacgggtctcctgatcctgccatggatggtcgggcttgccctcggcaaagcgccggttgccttgcagcatgcgactccacgttgcgtttgcggtcgattcctgttcaaagtctgactgagccatgaaacctccattatcagcgggctgctgattgccatattagcgagtattcgcgcatagtcgtgattggggcaacggccatttgggcacaagggttgcgggtggtgtgataaggctcatacgttacacccgcgcgagccgtggctcaccacattacgataggtggtggtaaacgcttgaagattaacaattcccgaaaggaccgatgatgactcttctgcagcatgaactgaccgatttcaaggtgaacgcattccagaacaatgagttccacgaagtgaccaaggacgatgtgctcggccactggtccctgttcttcttctacccggccgacttcaccttcgtgtgccccaccgagcttgaagacctggccgagaactacgccaagttcaaggaaatcggttgcgagatctactccgtctcctgcgacacccacttcgtgcacaaggcttggcacgacgccaacgagaagatcgccaagatcgagtacccgatgcttgccgacccgaccgccctgctggccaaggatctcgacacctacaacgaggccgatggcgtggctgagcgtggcgacttcatcgtgagcccggagggcaaggtcgtggcctacgaggtcatctcctccaacgtgggccgcaacgccgaggagctgctgcgccgcgtgcaggcctcccagttcgtctacgagcacggcgaccaggtctgccccgccaactggacccctggcgaggaaaccatcgagcccagcctcgacctcgtcggccagctgtgatcgacactgaataggcggtaaccttggctcccctctctgaggggagctgtcgctgaaagcgactggggggagtgctcgcgagagctagcctgatccgatatgctcccctcagtctcactacgacagctcccctcagagaggggagccagtgtatgtaagggagttttcatgactcagaccaacaatctctatgacgtcgtcgtcattggtggcgggccggctggcctgacggccggcctgtacttggcccgcgctcgctaccgtgtgctgattcttgaaaaagatgatttcggcggccagatcaccatcaccaacgaagtcgtcaactatccgggcgtgggccgcaccacgggccgcgcgctcacccagaccatgcgtcagcaggctcaggacttcggtgccgaattcctctccgccgaagccaccggtctcgacgtggatggtgacatcaaaaccgtgcacacctcacgcggcgacctcaagacgttcggcatcctcatcgccaccggcgccagcccgcgcaagctgggcttcgagggcgaggccgagtacgccggccgcggcgtggcctactgcgccacctgcgacggcgagttcttcaccggcaaggaagtactggtggtcggcggcggattcgccgcagccgaggaatccgtgttcctgaccaaatacgcctccaaagtcaccgtgctcgtgcgcgaaccggacttcacctgcgatgccgcagtggccgccgaagccaagaacaacccgaagatcgacgtgcgttatcaggttgagctgaagggcgtcaccgccggccaaggaggcctgcgagaagcctcaatcctgaaccttgccaccggccagaccgaaacgtggaagcccgccgacgccggcaccttcggcgtcttcgtgttcgccggctatgtgcccgccaccgatttggtgcgcggcgtggtggagctcgacgaccacggttacgtggtcacgcacgactacctcagaacctcggtgccgggcgtgtacgcggccggcgatctgcgcgtcaagaacctgcgccaagtggtcaccgccaccgccgacggtgcgattgccgccgtggaactggagcgttacgccaagcagatgagcgagaaaaccggcttggtgccgccgcgtcccactgcttccgcttatgaggagtccgaggccaaggccgcctccgccgcctcggccgctggcacgacgcccgccccggctcccgccaaacgcagcgccgatgccgcagccgcagccagcgccgccaagaagcccggcgaactgttctccgccgccgtcaagcagcagcttggcgtggtcttcggacgcatgacccgcccggtcacgctcgctctcgagctggacggcactccgctttcggcggaattgcagggtttcatcggcgagatggttgcgctgtccggcggcaagctgaactcggttgccgttgatgccgcagggctgatcacggcggtggatggtgcttctgtgcctgcttctttggtggtcggcgaaccgctgtccgtcaccttgccggacggcaccgaactgcccacttatggttcgttggacgattccggccgcgccacattcgacgtcgccggcgtcctgccgctcgcccgtccgaccgtgcgcatctgcgtgccggctgagggcgacggcaaggccggcaaggacggcaatggttcactggtcttcaccggtctggccttccacggcgtaccttccggccatgagttcaactcgttcgtactcggcctgtacaacgcggccggtcccggccagccgctgggcgacgacctgatcgaacgcgcgaagtccatcacagacccgctgaacatcatgatcctcgtctcgctcacctgcacgatgtgtccggaaaccgtgcttgcttcccagcgcattgcctccctgagcccggccgtgcgcgccgaagcctacgacgtctcgcacttccccgaactcaaggaccagtacggcgcgatgagcgtgccctgcatcgtcatcacccacgccgacggcacccagcaagttgaattcggcaaaaagagcatcccccaaatgctcgaactggtcggcgcgtaagccgcacgacctcaggtactcaacagcaacaacaacgattctgccaaaatcgtgacgtacatcgattgatgcgatcgatgcgcccgactccggcagaatcgttgttttgcggcagctcagcctcggtcttcgacggccttcgtgacgtttctgtcgccgaggtacttgaccaagctgatgctgatcagggccacaacgaacaggccggtgagcaccgggatgagtgcggcgtagcggtgggcctgatcaggcgcgtgggcaactacgaacgaggccaactggttgccggacagaccggcgaacgcccaggcgctcagcgtcagaccgtgcgtggtggagacggttttggtgccgaagtgctgatcaagcagcacgggcagcgtcgagaaaccgccaccatagcccgcgttgacgaggaacagcatggccagcacggcccacagcagagcgttgccgatgctgttggtgaagatctgcagcaagcacacggcaatcgacatgatgaagattacctgatagacggtctcgcggcgcttcaggtggtcggagagtgtggagaagcccacgcggccagccgtgttgaacacggagtccacggcgagcaccagtccgatgatgccggagatggcggcggcaaacttggcggggctcaggttggcatactgcgggaaggccctgagcacatcgtgcaggatgtccttctcttggctgatgagggccaggccgcaggtgatgttgatatagaaggctatccagatgccccagaacacgggcttcttgaggattgtcttgcggctgacgtgtgaggtcgcgggatcgtacacccagccggccggacgcttgatgagcaggaagccgacgaacatcatcaccgcgtagaccgcggcgaggatgaagaacatgctgaccaggccaaccgtgccgatgagatattccatcagtgggctggcaatggccttggccaggccgaagccggcgacggcgatgccggtggcgaggcccttgttgtcggcgaaccaaagcatcaggttcttgaccggagtcagataaccgacgcccaggccgatgcccatgatcgcgccataacagatgaacacgcccggcaggaagttcagggcgatgctcacgcccgtgccggcgaagccgaccacgaagcagaccatggagacgagtgcggatttcttgatgtttttctccaccattggcccggcaaacgcggcggacatgccgaggaagaagatggcgagtgagaagccccattccacggaggcggggctggcgtggagacggtcagcgataagctgcttgaacacgctccagcaatagacggtaccgattgggatatgaatcagcagtgcagggataatcgcgctggtccaacgattctcggtaaaccttgccatatatgggcggatcctttcgtaactggtgtacgatggcctgccggcccgaacgagagtcgtatcgcccatatccacgcacatcacgacggcatgcccccgtgaaccatccgggctgcacgaatcgaatcaaatcgaatcgtgcgaactgcgaacaattcgctaaacatccttggtgtgcatttcatcggcgctactggctcttgtcgacgccgacaaacagaactataacgctgttatggggttgctgtggctgatttctgtggtcggaagctatgagctttctcacatcgaaaacagttatatgacggtatcggcgtgattgatacgtgacgtctgcccgtggacgcggcatatccctctcggaaaacaatgactccgtcatgtccatttcttggtttgacatgttttcgtttgcagcgtcggtgctcaccacggtgaccgcggcgttcgagtcgccgggcagggcctcgaccgagggtctcatcctcggctgagatgtgggcggtactatggattcttatcgataaggttcgtgatatgcggagatggtaacgatggtgaccttaaaggatgtcggcgaactggccggagtgaccgccaccaccgcctccgcggccctgcgaggcaaggattacgtcaagcccgaaaccacgcagcgcgtgcgtgacgccgcccgcaaactcggctacaaaatcaacctgtctggccggtccctgcgttctgggcggtccgataccatcaccttccttacctcgggcctcgagggcgactatttctcccatctggccatgtgtgtggctgaggaagtgcacaagcgcgactcgcacatgctcatcgaactgtcccggtatcttaccgacgacaacgatctgtcgtacacgttttcggacggcatcatcgccatcaatgcgccacgtgcggtcgatatcctgaagcggcacccggccgtcatgctggaaaactacgacaccagcctgcccgtcgacaccgtgaacgcgccgagcgacgccggctcacgggcggcaatcgaacaccttatcgcgcgtggctgtgcgcgcatcggcatcgtcggcgacaatcacgatcccaacaatcccaacatcattcccggctcgcgtgatattcgtatgcgggccgccaaggagacgattctcgcggccggactgccgtttgacgagcgccgtgatttcatcaaatcctcgtggtcgattgacggcggtatcgaggccgggcgcggcttggccaagaaaggcaagtgcaagtacgacggtctgtactgcctgaacgacggtattgcgctcggtattctgcgtggtctggcggatgatggcgtgagcgtgccgggcgatgtgcgcgttatcggcttcgacggcctgagccagggtgcgtacagcgtgccaatgctgaccaccgtggccacggatttcaagggcatggcggataccgcgctgaccttgcttatgcggcgtatcgagaacccggacgatgaattcttcccgcagaccgtgaacgtgggctataagctcatcgagcgcgaatccactgcggcgtagagtctttggccgtgttgagcttcaattgggtgattggactggcaccagcggctgatatcagatatgccgaaagcagcgatgatcggatttaagttgctggagatgacaggatggattgctctttacccctttcaccatcttgcaataattcttacatgtaagaactctctgttaacatgtaagaattattgcaagatggtgaaaggggatgctcatgttgccggccaaagaaagtttgacggttgagttcaagagtgagcagaagcgccctcaatcgcatgatgaaattgttgacaacgtagtggctctagccaataccgaaggcggcacactgtatctcggtattgaagacgatggcactgtgaccggcgtatgtgacgagcatcgcaatatcaatggacttgcggtactaattttcaataagactgttccgcagcttcccgctcgcgtggcgctcttgtatgagaacgaggtgccgatagtcagtattgaggtggataacagtcagcaaatcgtatctaccagtcaggggaagacattgcagcgccggctgaaagcagacggctcgcctgaggtcgttccgctgtttgtttcccaattcattagccgtttatctcagcaacggttctacgatttcagtgcgcaacctgccccagaggctcggttggacgatttgaatccagactcacggaacaagttgagaagccatattcgcagtgccaatgcgcaaaactcgttgttgtcttttactgatgaggatttcgatcgggcacttgagctggttgttgatggcccgtatggattgcagccatctgttgctggtctgctcaccattggttcggttgatgctattcatcgatcggttccagccgcatcggctgtttttcaagtgatgaaaggcatgtctccaaaggtcaatatggatccgttcgtgttgcccttggtggatatgtttgatcgtgtaggcgagctgatggagccgtggaatcccagccacgaagtcatgagcggcttgattcgggtcgatctgccagacttcgatcgaggggcattccgtgaggcaatgattaacgctttctgccatcgcgattatgcacgaatgggttcggtgaggttcctggttgatgatgatgggttgaccatagccaaccccggaggattcatagagggtgtttccgaagataacctgcttactgcacaaccgcgttcccgcaatccgcagcttgccctgattctgaaagctgccggatatgttgaacgcaccggacgaggcgtggataccatctatgccgggtcgattgcggcgggtggttctttcccggattattcacagtccagtgctgaggaagttatcttgttcttgcgccgcgtggtacctgacgaggcattcgtaaccatgattggcgacgaggaacgtcgacgtggggctccattgccggtctggtcactgattgtgctctcgctgctgcgtgagcatcgtaggcttaccgtggtccaattgtgcgatttttctcatttggagcatcgacgcatcgtgtccgctgttgagaatctggtggaagctggtttggtagagggggtcggtagcgggagctctcgttcgtatatgctgagtgcccgagtgtacaaacgttcagaggggctggcgtcttacgtgcgccagcgtgacatcgatgccacccggcgcagtggccttgttctggagttcgccgaaaaaaatgatggtgtcgtcactacggcggatgtcatggatttgtttggcctgagctatatcagtgcataccggttgttgaagaagctagaggatgcgggcaagttgcgccgcgaggggaatgggccgtcatcccgatacgtgttgggatgattggcgcgcgtgaaagtaagttctttcatcacctttcaataattctttcatgtaagaactctctgtttacatgtaagaattattgcaagatggtgaaagatgtacacgaaacggggaagctctgctcgatgtgagcggggcttccccatatgcgctggtgtgtagatcagcctgtgttctgcaggccggcagcaacaccggagacggtgcagaggatgaggtagatgaatccggcctgttggctctgcgtgttttgcttcaatttttcttaagcagagtgagacccatcgtatcgttcgattctacgacgaacgttttgcatcaagcgcagataatgtggtgagtgcatattcaacaatggcggacggtcttgatgcacttggtttgacaaatattggaatgagcgaaagcatcctaaaaaaggctgccggtacagacaagcttcctgataagcaggaagctgaagtgagtgctcgggcgttcgctgcattcattgatcagccaagacggtagctcgcataatgcattatgtgtgggcagatgtgtcgtctgcccacacattcgctgttgtgctttcgatttggaattcctctgccagatacggggaaacttctaaaaggccgctatgccgaggaagagtcctgtaataccggtggccatcaatacgatgatggtgatgattccggcgaagatgcgtacaggaagggtttcttttccatggtttgatgggctgtccgcaactaatctcattactccagctgtaacccagcaaactgcgcccaggactagtgccaggaattctcgacaccattccgtttcaagtgcgggaatgccgacgattgatgacgggtcgcttgccagtcttggcggaatagcgcataggatacgctccaatatcaggtaaggggtatcaaaatggatcagagtcaaagcgaatgggagctgtagcgccagtcctatccaccacagcgtgcgtcggatggtcgcgagtctgtcgcccggcctagtgtctggcttgccgccctcgccctccgtcccggcaccgtccgcgggcgtgtggtccccctcgtgcgcgtccatcgtcccgtccgtgtccttctcctcattcatatgtcccctttcgatcatccgagtctgtcactcggcccgcgcgcccgttctatgcgcgccgtcgccggccagtctagggccgtgcgacgcgaacggggaggcccgcgccgcttatcggcacggaacttccctgctcgtcaagcggtcggtcagccgcggatcagcccgtgttctgcagaccgacggcgacacccgagcaggagtgtcacaaagcccctgccgctctgggtacccaggtggcggtttatgaggacagcatcggtcaactcatcctgcagtggctccgcaaacctacgtactggtcggaaggtagttccggcacgcaggcactatggcacgcgtacaccccggagccggttactcccagcgaattggccttgtcgcgtcaggcatgcggtgtcgcatgtgatgcgcaacctgtcatcaaaggcacactgcccaatcgggacatcgcccatatggccgccacatccttgggatacttgacatggggcgttacgaacgatccaatggactatggtctcggtgatctgggcggatgggctctggatttgttgcagatttggggaagctacctggcgaataccccggaagaggacctggcgtcatggctgcacactcatctcggcgagcaagacgcccgtatgggattcagttacagcgatgttctcgcggactgcgatgcatggttgctggcgcggtccatgcagagcaattcctccgaaaggtctttgtccaccgctatgcgggacatgttcgcgcaaagcgagacgaatcgaattaaacggttctatcagtcccggttcaagggaagtgcggacaacctggtcatcgcatctcgaaagctcgttgatggaatcgatcttggaatattcgataacgtatccggaagtaaaaaagcactgctcattgcgtcacatgcagaccgcccgttgtctaaatgaaagtgcaacacccgttagattggaaattgcctagaaaaccagtccgaagggatgtcgcacctatgggagaagtatattcgcacctgtcggaagaggaacgccaggtcatccagatcgaggtaggcaacggcgccagcatacgcgggatcggcgcgatgctgggccgcagcccgtccagcatcagccgggagatcaagcgcaacacatggttcccgtccaacgagaacgagtcgtaccgcccgtaccggccgaaaagactgaaggcggggccatggaccggccgctactacatcgccgggcccgcgcagcgcaaggccgaccgcaggagatccaagccacgaaagccctaccggctgtcgcacgaccgcctgtgggcgcaggtggccgaatggctgggccgcggctggtcgccgctgctcatcagcggcaggctgcgcgtcctgtggccggacgatgcgctcatgcgcgtgtgcccggagaccatctaccgatgggtctactccagcaggccgcttcgggaacgctgggcgcggtgcctgccgcgagggcacaggcggcgccgcaggcacggcggcaggaggacgtcgcgcttcccgatccccggccgagtgcccatctccgaacgcccgccggaggccgacggcaggagcgcgttcggccattgggaggccgacagcgtcatcggagtgggatgcaacctgcacaccgaggtggagaggaggaccaggttcctcatggcccgcgtcgttccggacaagaccgccggcgagagcgtcggggcgcagctggacatgttctcgccgctgccggccggcgcgcgcgtcagcgtcacgcacgacaacggcaccgagttcgcccaccacgaaaggctgcgcgacgggctgggcatggccacgtacttcgccgacccgtactccagctggcagcggggaagcaacgagaaccgcaacggcatgatccgccggtatctgcccaaacgctgcgagatacggatggacatggcaaaggaggtcagggagatcgtcgacgagatcaacaaccgccccatgcgcgtgctcggctaccgcacgcccgccgaggcgttcgccgacgaactgttagaattacaggaccaacaagggtgttgcacttctaaatagacatcgggccgactcccgagtcaagcggaggctggtatattggcattatcctatactgaatctcttgaaaatccgaaccgttaatcaatcatgattgtgatcgcattgcgtggaatgattcagccattccacgcaatgcgcctctggtaaaacgtcatagagtcattagagcggaaagtagcgttatcacaaaaacaggaaagaccataaccagcacgagaaacgatatgattcccacaaggacatgcgaggcggaaggggaatgatcacgaagttccggatacgtagatcgcatatatgaacgcacgccaaagatgacaagcgccgcaatccagcagactacccccataatcaatactaaggtaagtctacgtacatactcagttgccgtagttaaattcatgcacgaagaggaagagaacgttagaactctgcagattatagtatcatcatcgccattggtgccccattccgcccacaaaataagtgctggtgaaagcagcagtaatcccagccaccatagcacgcgtctggccttgcccaaagccacatagcatctactcgccttatggaatttggtagctgctttcggtgccaaagcatatttcttgccggaaaaactttctgacgtatcttctgtgccgtgtttcttcccaatgccatcggttgtagccggattcgctttgcaagcgtggcgttcgttcccggcgtcgccccccgtcctgatgccgtccgtggacccggtgttcccgcgcccgcccgctggcttgcccatgtcccctccgatctgtcgaggtgcccgttccgcgcgtccgttctctgcgcgcccgcccggcgtgcgccgtcgccggccagtctagggccgtgcgacgcgaacggggaggcccgcgccgtttatcggcacggaacctccccgctcgcttttgtcggtcggtcaggcgcggatcagcctgtgttctgcaggccggcagcaacacctgaaacggtgcagaggatcagatagatgaatcctgcctgctggctttgcgagagttcctccttgtccaccttcttgcgcagcgacctgagcgccagcacctgggtgacggacagcgcgtccacgtatggggagcggatgcggatggcctggccgagcacgtggcggtgctgcagcggccacttgtcgcccacgatggccagaacccacttgcgggtgagctccatctcgttgagcaccttctcattgaggtcctcgcggtcgccgagggcaaggtacatcctggcgatgcgctcatccgtcttggcgatggacatctcgatgttgtcgatgaacgtggagaacagcggccattcctcgtaagcctgacgcatggtctccagatcgccgaacttctcgcatgcggtgccgagaccgtaccaggcggccaggttgatgcgggcctgagcccaggagaagatccacggaatcgtgcgcaggtcgtcgagcgacttggcgccgaggccacgcttggccgggcgggagccgatcggcagcaggccgatttcggtcagcggcgtaacgatcgagaaccacggggcaaagccgtcggtgttcaacaggtcgaggaagcggttgtgcgcggcctcgtcgagctgagcagccatgtcggcatacttctcggtcatctcggtgttgcgcttctccacgctcggcgcggactgcagcaaggtcgccgcagccacggactcgacgtggcggatggccagcaccgggttgccgtaacgggcgaagatgacctcgccctgctcggtgagcttgaagcggcacttgacggaaccgaccggctgggcgagcaccgcacggttggcggggccgccgccacgacctacggcgccgccacggccatggaacagggtcagatcgatgtcgtgcgactcagcccatttggcgatgcgctcctgagcggagtgcagggccagcgtggcggaggtcgggccggcgtccttcgaggagtcggagtaaccgagcatgacctcgagcttgttgccggtggccttcagacgagcctgaacctcggggatcttgatcatttcctcgagcacgtccaccgagttctgcagatcctcaagctgctcgaacagcgggatcacgtcgatggtgggcacgtcctccgggtgggagaaggccaagcggttgagctcgtagacatccttgatgttctgggcactcttggtgaaggagatgatgtagcggcgggcggccttgaggccgttgcgcttctggatggcaccgagggcgcggaaggtgtcgagcacctcgtgcgtcatcggctgcagttcgccgcgctcgccgtgcaggccgtgctcgcggatatccgcaagggcgcgggcgtgcaccacggagtgctgacggaactccatctccaccatgtggaagccgaaggtctcggtctgccagatcagatcctgcagcgggccgtaagcggaacgcttggcaccggcggcggccagcgaacgctggaccaccttgaggtcggcgaggaagtcgtcgcaggagtggtacatgaggtcggcgtcgcgctcgatggtgtagtgcagacggtcggccatcaccagcatgaccgcgcggtgcatctccttggtggagatcagggcggccttgtcggtcagacgctcgctcatttccttctggtggctccagaggctcttgagctcggcgctcggcagcgtggtctcggcttccatcgtgaggttgcggcccacggtgcgggtggcttcctcaagggcggcgattacgtgatcggagaacttgcgggccacggcgcggctcaccttggcggtgacgttcgggttaccgtcgcggtcggagccgatccagctgcccgggtggaagaacgcggggcaagcgggctcgacgagaccggccttatcgcccaggacccagtcgtcgaagcgacggtaaaccttggggatggtgttgaacagcgtgttgtcgaagatgtcgagaattgtgtccgcttcctcaaccggggtcggcttcttcagcgcgattggagaagtgcggaacagggcgtcgatctcgttgtagagacggcgcaggcattccttcttatccgagccgccgaggcgcttgtactcctcaagcaattcggaaacgcggcgaatcttgccttccacggccttacgacgggcctcagtggggtgcgccgtgaagacggggtggaattcgagctggttgagcagttccttggccttggccgggccagtctcattgatgagctggtggtaagcgacggtgagctcgttgatcgggtcgaccgcctggtcaacgggcacgttgttctcgcgctcgtggagcacggaaacgcggtagttctcctcggacaggtttgccagatggaaatacgtggcgaacgcgcgggccagcagctgggcgtcgtgcaacgtcatgttgtcgatgacgttcacggcctccttcaggccatcctggtcggggttcggatccttcagctcggcgaaatgctcggcgctggcctccaccgcgtaatgacgcacggtgtcgaacgtagacagcagttcggggttgtattcgcccagtacgttacgcaggatctcaagacacagatccatgtcgtacttcaggctttcgggaagatcatgctcctccgggccctttcggccggtcccggtagtgacgatggcggcgtcagcgggagtgatctgttcttcaggtgttgccatataacctcctttgccgaataacaggttgctcggtctactggtcgtctgcggctcctccgcagttgttgagaccagtcgttgcgagcccacagcccatattcaacgtggttgttgtgtgggcaatagtgtatccccgcgaaatcgctatttacgttacgaagtccatatagtgcgccaagttgtccacctatagagaccgaatatcggacagcatatgagacactgtccgattcgcggaagatttgagcgccttacgattgctggcggggaaggcagggagtagtaatgaaggatgtgagcgaacagaagaaaaaaagtgcgcccgaagcgaaaggcgcaacggctgtacgtaaattccacacccactccattccgctggacatggaagatattgcacgcgattgggaaaaaccggtggtggacgccggtatcgccgccaaagccagcgtgattgtacgagtcggcatgttggacctgggagccggcaccggctccttccgcgtgcgtgaaatgatgcaccgcatcgcctacccgctgggcgtgcacgtacgcgccgacgtgaacctgacggatatcgaggccacctgcacggatggtcgtaaccgcatcaccgaagtcgtggatttgccgagtaccggcgtgaacaccgaacgtatctggctgctggaacatttcgccgactggttctccgtgaatctcggcaaggggtcgatgtatcacgtcgattcgcaactgtccgatggcgtggtcaagcatttggacgaacgtgacgcttcgcagtattcggccgatctggccaagcgcctgcgcgaacgtgccaaggtcgaggctgaggcggccaacggcagcgtggacgaggcgctggatcttgcgtcgaaaaccaaggtactcgtgacctccgtggccaagtccttggacgatgacaatgaagaagcccaccgacttttggcggacagcgcggaagtcactccggtcgaagacaaagcggccgaagagaaggcctacgacgatgccgaagtgtttaccggtgactccaatgagtcggttgaatcggcgaacgcggcgaatgccgaggcgggcgctgagggcgcggcggcgaacggcgcaactgccgaaagccctgctgcaagcagtacgaagcgcaagaatcgcgtgcccaaggaatacgccgaacacttcaacgagcgctccgacgaagagaaggccaagggcggtatcaccgtgcggcaggcgcacgagcgactcgatctgattgagcgccgcaagccgctgtacaagccgtggttctccggtctggcctccgccctggcctgcgcggccttcgtgttcctgctcggcggtggcccatacgacatgatcggtgcgttcgtgggcgcgggccttggccagtggatgcgtcgccggctgtttgcataccatctgaaccagttcttcgtcacctttgtgtgcgtggccgcggcggcgctcgcctgcaccggcaccctgcgactcatcggcattttcgacccagtcgcgctctcgcacgatacggcctacattggcgccatgctgttcgtgatccccggtttcccgctcatcaccggcggactcgacatggcgaaaatcgacttcccctcgggcatccagcgcgtggcgtacgtgctgtgcatcatcctgatggccacgctggcaggctgggccgtggccgtgatggtgcacctgcacccggaaggctttgaaccgctggggcttgacccgtgggtcaacggattgctgcggttcgtggcggcgttcgtcggcgtgtggggcttctccgtgctgttcaattcgccgcagcgcatgtgcctggccgccgccctgatcggtgcgatcacggacacgctgcgcttggaattgcaagactttaacgtggcacccgagatggctaccttcatcggcgcgttcctggcgggcattctggcatcggcgtggcgttcatccgtgcgacgtggctggctaccgccgcacctcggctacccgcgcatctgcctgaccgtgccgtcgatcgtgatcatggtgcccggtctgtatatgtaccgtgccatgtggtacctcggcagcttccagaccatgaatgcgctggactgggcgttccgtgcgttcatggtgattatctgtctgccgatcggtttggcgatggcccgcgtggtgaccgacaagtcctggcgctacgacatctgaccgtcatcttggctcccctcaggtgaggggagctcggataaaacagcgtctcagtatggaaacggtggaaggtgcttgagcccttgtattcactaccatcaggcgaagtgcgttgcggccgtattcacggctgtgacggtctgtatgacgccgctccggcgtcaatcgcatatcagcacgcatatcagcacatagttctgccatggcggtagccgcttggcgtcatgattggggaggtgtcgcagttggccaacgatttctggattctgctggccatggtcatctattttgcggccatgctgtccatcggattcatctactccaaacgctccaactcctcctccaaggaatactttgcgggcgggcgcggcgtggggccgtggctcacggccctgagcgccgaagcctccgacatgagcggctggctgctgatgggcctgccgggcctggcctacttcaccggcgcggccgacccgatgtggaccgccatcggcctggcgctcggcacctatctcaactggaagcttgtggcccggcgactgcgccgctactcggtagtggccggcgatgccatcaccattcctgacttcttcgccaagcgtttccatgacaagaagggcgtgatctccaccatcgcggccgtgatcatcctggtgttcttcagcgtgtacgtgggcagctgcttcgtgaccgtgggcaagctgttcgccacgttgttcggtttcgactaccacgtcatgatgatcatcggcgcggtggtcgtgttcgtctacaccgtggtgggcggctacttgtcggtggtgatgaccgacttcattcaaggcatgctcatgttcttcgcgctcgcggtggtgttcatcggcaccgtggccagcgcgggcggcatcgacaacaccgtggaattcctgcgtgccatccccggctacctgtccggcacgcaggtggccgcgcccaagctggacccggccaccggccagcagctcgtcgaggcgggcaaagccgtgttcggcgcgccctccgactacggcatcatcaccatcatctccatgctggcgtggggcctgggttacttcggtatgccgcaggtgctggtgcgcttcctgtccatccgcagcgtggaagaagtgcgcaagtcccgaatcatcgccacctcctggtgcgtgatttcgctgggttgcgcagtgtgcatcggcttggtggggcgtgcgatgatgcccaccgaactgctgacctccaccgatgcggaaaccatcttcatcgtgctggcgcagaccctgctgccgagcttcatgtgcggcgtggtggtctccggcattttcgcggcctcgatgagctccagctcctcgtatctgatcatcggcgcttcggccatgggcgagaacatcttccgcgggctgctgcaccgcaaggccaccgacaagcaggtcatgattgtggccagggtcacgctggtggtcatgttcctgttcggcattctggtggcatacgaccagaactcgtcgatcttccaggtggtgtcttacgcgtgggccgggcttggtgcctcattcggcccgttgatgctgtgctcgctatactggcgtcgcgccaacaaggccggcgccgtggccggcatgctgtccggcacggcggccgtgctgatctggcacaacttcgtcaagcccttgggcggcgtattcgccatctatgagctgctgccggcgttcatcatttcgctgctgttcatcgtggtggtttcgttgctgaccgccaagccgaacaagcgcatgctctacgaattcgaccactacatggacgatccgctgcccggcaccctgccgtccggcaccgtgctcgtcgacgagcccatggaagccatggagtccgaggtccgcagcggcaaatgacacgtgcctgctgtgcggtcggctcgtatggcagaggagtggcttttttgtggttcggcaggaaccattgaggccaaaacggacttcgaggggctgatttgacgttctggagagatctacttccgtttcaaggggctgatgcctgagtagacgcggctccaaaacggcggaatggcgttgacgtaagggcattgatacacgtggtctaccggatgatcagccccttgaaacggaagtagacctccggcggaggccaaatcagccccttgaaatgggttttgaataccgtagcgcggtgcggacggtgcggactgactctaccgggcttattattcctgcgtcgtcggaataattggcagcagaggctcgaatttcagccgtttgtacagtggaatacggcgtagctttcggacatcgctaatttgctgggtagtttgccgcatcgtgagctggaccgttttgcccgtaacctcctgtatcctttcggcaactcttcgggcaagggcctcttctcccgcttcgtcgccaatatctaatttggtgacttgaatgtacttccagccagcatcttcgatcatctggcggcgtctcgcgtcattcagccattgcccggcatgatgagagccttcgtattcgatacatatcttgaattcagggtatgcaagatcgagatatatgggtctggtgttgtttcctacgaatattggataattcacctgcgggcaattcagaccgtatttcaagagaaccaaacgagttcgtgtttccatggaggaatctgtgcccgcgcgcgccaaaagtagggcgcgacggcatttgttatacccgcggaacaaatacgaattggtgccattctctttgtcggctcgcacctgggcctcggcctcatcgagatacagagaaagggcgtcgatggttgttctgcagagccttcgatctcgtcgcatcatggaatcagcgagaacgatgagttcttcaagttcgagatacgtggagaacatggcccatgtgcaagctggtgaagtgcatgtgaattgtccctcgattatgaccgtgtctagtggaaaaggccatacaaccactttgacccccacaatgtgccgtttgtcattggcgtgtggaaccgcaacaatggttgtagttgcaaggcctctgtgtttgcttgatatgcggggtacttcaattgacaaaagctccaacgctgttgtcagggcatagggtgggcgccatgcgcttcgtcgttgaacatctgcgcacgtctgcattcgttggtacttctgcattgtcagctcggtcaatgccgttgagctacccatgatgatcaccccttcgtgatgttcgctttgtcctcgcagtgtagagtccggctaccggccctgtctaccgccccaatttttcggtggataaatgtggataagtcggtggataaactatgggtgttcatcgcagttgcaggccatcccgcaattacatggaacgtaggggtttgcaggcagccagcgggaatcgccgtcgacggcgcgattcaacttggacgaatctccatggcgttcatgcaaaggtggcatgatggccggtatgagtagcttggtgcgtattgtcaatgccggtgttccggggtctcaggaccgcgtggatgtggtgcttcgcgatggggttgttgcgtctgtcggccctgctggaacggtctcggcttcggacagcacgatgcagactaaggcgcatacgacatcgttggaatacgcgacgaatgccattgcttctggcagcgtctcaatcccaacgtcggccgccgcacccgccgacgaaaccaccatcgacgccgacggcctgtgggttattcccggcctgtgggactgccacacgcacttcacgcaatgggctaagacgctgggccgactggacctcatcaatgcccgttccgccgccgaagcgatggacatgttgcgccgtcatctggatgagcgccgcgccgccgacacgcttgacccagatgccttcgtggtgggcatgcgattccgtcactcgctgtgggccgacgacgagcagcccacactggccgcaattgacgccgtgaccggcgaacagccggtggccctctccagcgcggacatgcactgcggatgggtgaattccgccgcggcccgcaggcttggcgtacatgtggacgaatccggtctggtcggtgaactcgaatggttcaacgcctacaccgccttcgacaaggcgccgggcgctgctgaagagactgaccgtctgctgcgcgaggccgaacaggacgccgcaagcaagggcgtggtgggcatccgcgattatgaaatggccgaaaacatcgatacatggatcaatcgtttcgcggccggcattaacggtttgcgcgtggacgccggtgtataccccgagcggttgcgagccgccattgacgcgggttggcataccggcaaggaattgccgggcagcgccgggcttggccatgtgggcgccatgaagctcatctcggacggatcgctcaacacccgctccgcctactgctccacgccgtattcgggcatcgagccgctgacgtatggcacgctgagctacacgccgcagcaaatcgaagactatatgcgcctagccaccgagcatggcttcgacattgcctgccacgccattggcgacgaagcgaacaccattgcgctcaacgcagtcgccgccacgcacgcacatggatcgatcgagcatgcgcagatgctcaaacccgtcgatatcccgcgtttcgccgagctggggctcacggccagcatccagccgcagcacgccatggatgaccgcgacgtcatcacccgtttctgggccaacccggccggcatcccttatccgttcagggccctccacgacgccggtaccacgctgcgcatgggctcggatgcgcccgtggccccgctggacccgtggctggccatttccgccgccgtgctcggcaccgaaagctctgaccgcgagccgttccagcccgagcagtgcctcgatgtgcatacctcgctggcagcctcgaccgccactggccgtgaccgccttgcatccggcgacccggccgatatggtgttgttggacgccgacccatacgccgccgatactccggaagccatgcgcgctatgccgcaacacgtcgtaatgacattgctgtgcggggagcgtacgtattgatgcaagccatcggcatgaagtgaccagaggtccgtcttgatagccgcgttgcacggaaaaacaagaaatccgcccctcgaagtgaagataggacacagcagacgccgcaatacaaaaacgccgtgtcagttgcccagttggggctgacacggcgtcttgctacgagcggcgggaaaatcagtacttcatgcccatggcctcgcgcacctggtcgagggtctcctcggcgatggcgttggcgcgcttgttgccgtcgtgcaggatgtcacgaatggaatccatgtccttggccagctcggcgcggcgctcgcggtgcggggccaggaactcgttgactgattcgatgacgtatgccttgagcgcgccggcgccggaatcaccgatctcctcggcgatgtccttcgggtcgcggccggtcaccaggccggcggtggtcagcagggcggagacctgcgggcgggcaaccgggtcgaaggtgatgcggcgctcggaatcggtcgggctcttcttgatgagcttggcggtttcctcggcggtggcgcccagcatgatggagttgccgtacgacttgctcatcttgcggccgtcgagacccggaatctccggtgcctcagacagaatggcggccggctccgggaacaccgggttcttcttggcgtaacgctcgttgaaacggcgggcgatggtgcgcgtgatttccacgtgcggcaggttgtccttgccgatcggcacgacattggccttgcagaagaggatgtcgcacgcctgatgcaccgggtaggtgagcagcagaccggtcagcgcgtggccggacgcctccatctcggacttcacggtcgggttgcggtgcagctcggcctcggtgaccaaggacaggaacggcagcagtagctggttctcggccggcacggcggagtgggtgaacatcatggtcttgttcggatcgatgccggcggccatgtagtcgagcaccaggttcagcacgttgtcttggatgtgctcggtggtgtcgcggtcggtgatcacctggtagtcggcgatgatgatgttcgtgttgacgccgcgctcctgcatggcgacacgctcacggatcgagccgaagtagtggccgaggtgcagccggccggtcgggcggtcgccggtcaacatggtgaaggacgacggcttggcctccagcttggcgagcgtttcgtccgaacgctttttggccgcgaggaagctcgcgctcatctcattgcctgccgctgtcagttgctgctcgtcggtcatgcgaaaatcctttgaatatgccctaaataaacgctttttatggtaaaagtgtgagccgacaacgaacaagccactattagtggtactctctattgttgatgaatcgaacagcacagtaatcgcagggggtcagatgggccgcggacgtcaaaaagcaaaacagcagaaaattgcccgaaagctcaagtacctgaccaccgataccgactacgatgagctggcaaaagagctgagcgagcaggagccgggaatgggctctcctgacccgttcgccgacatcgatgaccagtatgcggacaaggatgtggattccgctgctgatgaccacgcttccggtgccgccgaggcagctcccgctacgcaggaggatgacctcgacgagtacgccaagtgggctgccgaagccgccgcaaaggcgaccagcggcgagttcccggcctccgcgcctgccgcaccgaagccggccccgcgcaagccgattccgatgcccatgccttccgcgctcaagcccaagaagagctgaacgccggtcttctcgtaataatccccttgtgcttggttgagcacaaggggatttgtggttatggctgatggtgccgccgctggtggcttacttacgcttcgcgcctcacagcggcagcaggtcgctcaggtcgtcgcgctcgccgaccgcgctgatgtggccggcgtccttttcctctgcccatgtggtgatgccgcaggccagccgcagccagacttccgggtccagctcgatgacgtccggcggggtcaggttatgcgggtccgattccgggccgtccaagattttgaccgccccccacggcgcgacacgcacctccacgccagggccgggtgcgcgccgctccagcagaaacagcgagtagcgcacggccatcgcccacaccgggcgtggcaagacaggggagacggtcagacgatgtggtgtgttgtccgccagctcccgggccgcggcacgccattgcaccagcgcgtcatgcccgcgtttcaggtctttttcaagaattactgccatgtatcccatcatggcaccggagctggaagatcttccataatgcaaacgatggcatacggtgtgatgcggaatatcggggcatgtgctacgctctaaatgagaacgtatgcaagaacgctccgccatcgtcgttacggagagttcatgcttacgtttgtgcgacgatacctatcgcgcggcataataaacacgggcacttatcccggaaggaaagtcagaatgaccgaaatcaccgcaccgaagtctcctgtcacggcggaacaattcgccgacgagattcgtgaacaactgaaatacactcagaacgtcaccaccgagcaggctacccctgctgacgtgtatgtcgccgcatccaaggccgtgcgcaaccaccttgccgactcctggttcaagacccaggccgacaccgtgaacggcaacaccaaggccgtcggctacctgtccgcagaattcctgatgggtaagcagctgcgcaacgcgctgctcaacgccggtctgaccgagcagttcgacaaggccgtggaagccctcggcttcaaggtccaggacgtcgtcgacgccgaatacgagccgggcctcggcaacggcggcctcggccgtctggccgcctgcttcatcgactccctcgcctcgctgggcgtgccggccttcggctacggcatccagtacaagtacggcatcttcaagcaggagttcgacaaggacggcaagcaggtcgaaaccccggactactggctggccaacgaagagccgtggggccacatcgactacaaccgcgaccagaaggtttccttcggcggcaaggtcgtcgagaacgccgacggcaccaagacctggcagcccgcatggtccgtgcgcgccgtgccggtggactacctggtccccggctacaagtccggccgcgtgaacaccctgcgcctgtggagcgccaagagctacgacgagttcgatctgctcgccttcaaccgctccgagtacatggaagccgtgaccccgcaggtcaaggccgagaacatctccaagattctctacccggaagactccaccaaggtcggcaaggaactgcgccttgagcagcagtacttcttcgtctccgcctccctgcacgacgccatccgcgtcttctacccgggccaggacaagccggatctgacgactttcccgaacaagatcgtcttccagctcaacgacacccacccggtgatcggcatccccgagctcatgcgcatcctcatcgatgagtacggctacgactgggataccgcgtggtccatcaccaccaagaccttcaactacacctgccacaccctgctgccggaggcccttgaggtctggccggccagcctgatcggcgagctgctgccgcgtcaccttgagatcatcgagaagatcaacgcgcagttcgaggacgagctcaagtccaagggcgtcgacaagaacaccatcaaggacatggccatctacactggcgacgccgtgcgcatggcctacttggccacctacggcggctcccacgtcaacggcgtggccgagctgcactcccagctcctgaaggacgtcaccctcaagaacttctccgacgtctacccggacaagttcaccaacgtgaccaacggcgtgactccgcgtcgcttcgtcaagctcgccaacccgcgcctgtccgacctcatcaccgagggcctcggcaccgacaagtgggtcgccgatctggaactgctcaagggcctcgagccgctggccaaggacgatgagttcgtcaagaagttcgccgccgtcaagaaggccaacaaggtcgacttcgccgcctacgccaagcgcgagtacggcttcgagctcgacccgaacaccatgttcaacaccatggttaagcgcctgcacgagtacaagcgccagtccctgaagatcctgtccgtcatctccacctacgccgacatcaagtccggcaaggtcaaggccgaggacgtcaccccgcgcaccgtgttcttcggtgccaaggccgccccgggctactacctggccaagatgaccatccagctcatcaacaacgtctcccgcgtggtcaacaacgatccggacgtcaagggcaagctggccgtgtacttcccgtggaactacaatgtgcgcctcgcccagcacctgattcccgccaccgacctcgacgagcagatctcgcaggccggcaaggaggcctcgggtaccggcaacatgaagttcgccctcaacggcgcgatgaccgtcggtacgctcgatggcgcgaacgtcgagatccgtgagcgcgtcggcgccgagaacttcttcctgttcggcatgaccgtcgacgaggtcgagaagaagtacgccgagggctacaatcccgcctcctactacgaggccgacccgcgcctgaagcacgccatcgatatggtggccgacggcaccttctccaacggcgaccgcaacgcctactccccgctcgtggccgactggctgaccaaggactggttcatgaccttggccgacttctccgcctacatggacatccagtccgagatcgaggccctctacgctgatgagctcgaatggaaccgcaaggccctgctcaacgtggccaactccggctacttcagctccgaccgctccatggaagactatttggaacgtatctggcacactgctcctctggctgactgagtgagcgagttgctagcgtgcggttttcacgaaatcagccttgacttcgtgaaaaccgtacgctgagttggagtaagcgtgcggttttcacgaaatgaaccttgatttcgtgaagaacgtacgctgagcgcgactcagtgtacggttttcacgaagtagggctttatttcgcggaaaccgtacgctgactgagctacctctagccccctctgatgagggggatgtcagcgaagctgactgggggagagacttctcccagacgcccaagacatacaagaaagccccgcaatgatatatcgatcgacgatatatcattgcggggctttcttgtgttgaaagaagagagggggtatcaggcctcggccggagcttcggctgcgggcttgtcctcatcctcggccttattcagacctaggtcgaccggcgaggagctgttctcccacggctcctcccacggatcgtaatccgggttctgctgcttgtagatgtacaggccaacaagcgcggcgagcaatccgccgaacagcagcgcgaagaacttccaaccgttagaagacttgttctccatgacggctcctttccctagggatcgtctggtcggtatgcccattcagaccgactctgctccctattctaggccgctgtttgtgacgattgggtggaatgacattcgtgggcgattcatccgcgcccgtctgcccttggccggctcggcatcttcgcggcgcatggaacgcatccgagaccttcgatacagtgggctgcatgcatattcctacacaacgggagattcgataccagtgggagcgcggtggtccggtgatgacctgggcgctgattgttgcgtgcgtggcagtgtggctactggaggtattgctgggatttattgccccgggcctgagggcttggttgatgtacctcggcatggcggctccggtcagactggtggctgagccgtggacgctcatcacctcgatgttcctgcatgcgccgaactcgctattgcatatcctgttcaacatgattgctctgtattccgtgggcccagtgctggaacgaatgatcggccactggcggttcttgggactgtatgtgatttccggccttggcggctccctgggacttatggtgtgggctgcggtggctccgggaggcatcggctggcagatggcagcctatggggcttctggagccttatttggcctgtttgcatcattgctggtggtatatcgccgtatcggcgccgatatccgctccatgttgatctggatggcggtgaacttcgccttgccgttcgtggtcggtggcgtggcgtggcaggcgcatgtcggcggctttgtagtgggtggaatactcacatggctgctggtgggtggtgtgccggcgtggcgcggtaaaagcctgaaatggcgcatgcaggtgtacggctgggccatggtggtgctggtcattgcgttgattctgttgtgcaatatggccaatccttacgggtggatgagtttcggctccctgcactgatatggcttgatatggcttgatatggcttgttggcttgatatggcttgatatggctgtaaaaaaaaaacgattgatgccgggtattgcggaacatgcagtgcccggcatcaatgtatgtgcggaaagcgacgatgtggatattagcgatgtggatatcgtcgttcggcgagtgggtgtgtgccgtatgaagatatccacagtaatgagatgcgcgcaatgacgagttatccacgataatgagttatccacaatggtgacttgtgcacaagtgtgtagaaaagtgcataagactgtggataacttatgtggataagttaggaatgccgcggtattattgggtttgttgcagtggataactcgggtgtataactgttccctcgctgtggcgatgtatgccaagccaaagttatgcacgagatatacaccgagaaacgccgcttatccaccacttatccacatggttttccacattcggtggaaaactacatgggtgtaattcatccacaggctgtggataacgtagtggataagtcgtggataagtggtggatagctgtggatgaacaggctaaggcacgaaaaaggccgacctccgcatacgggaggtcggcctttctcataagaattaaggacaacctaacgatagaaaaaacgatctaccgatagataagcgcaacgagccggaactcagcgccatcccatcgtcatcaggaatccgatcatgatcagggcgaagccgatgccgaggttccacgcaccgatgttcggaatcggccaggagccggacggggagaggtagtacaccacgcaccaaatcaggccgatgatcataagcgcgcagaacagcggcacgaaccaacgcgggttcgacttggtgcccttaatggtttcttcaacgcgcttggtgttctccgcctggcggttcatcatacgctgcatctgcggggtcagcgtggccttatcggcagtggcgttgagcacggcctgcacctgctccatattcacgccgtaagccgcgtcttcctcggcagaagcgttctctgcgttctgctcggtgtctttgctggcggtctcgtcagcaacggtgctggatgaggtctcgctctgccagtccttctggttgttcgagtcggtttcgtgcagctcttcgtcagccatcagcatagtctccattcaataggctaaaagtcataatagtggctacactcgaaagcggcgaccagagtcggcaagaagacaggaaattcatggccagacatgtaggtaagcacggtgcacggcactccctatggggtggtgtcgcggtattcgtcgtcattgccttgaccggttttctgctgagcaccaacgtgagggtcaatcgtacggttgccgtcaccaacgatacggctgatctggtggagcaaggcgtggacgaggtcaaccagctgcagcaggacgtcagcgatctgaccgaacaggtcgccaatcttacggacgcgctcaaggccgatggcaccgacagcacacagaaccaaggcaaggactccagcaatgtggattccagcctgatgctgcccgcgctcagcggcagcggcgtaacggtaacgctggatgattctccgttgtgggagaacgccgtcaacaacaacggcacgaccgccaatatcaacgattacgtgatccaccagcaggacgtcgaatcggtggtgaatgccttgtgggccggcggtgccgatgcgctgatgattatggatcagcgggtgctgttcaattcggcggtcatctgttccggcaacgtgctgtcgttgcacggtaagaaatactcgccgccgttcaccatttccgcgattggtgacccgcaaagacttcgcgcagcgttgaacggctccgaagccattaccattcttaagcaatatgtgaccgcgtttggcattggctacaaggtggagaatgccgaggaccttcagttccccgctaccgctgccttgctgcagcagttgaaatatgccacggtcgatacgtcaaagaccacagatgaggagcagactcagcaatgagacacggcaggcacaacagcggcgtaccggcgcccattgatctcgcgtccgtgtcggacgtacagcccttccccgaggacgatgccgcacgaatggcggcagacccggccaacgccagtagggcaaggtcccgtcgtgccgcagtacgcggcgcgtcttcgccccagcggagcccggtctggcaggcactcggcatctgcgccgaactgctgattaccgctgccgtgatttgcgccctgtacatcgtctggcagatgtggtggaccggtgtcgaggcggagcgagcccagaacgaaaccacccagtccgtcgactggagcgaccccagcaacaacgggggaacggtcaccatcgccaaagcccaggagggcgatgcgccggtacagccgaaagacgcgaaatatggcgacttgattgcgcagatctacattccgcgcttcggctcccaatggcaccgcaacatcgtggaaggcaccacgctcgagcagctcaatcgccacggtctgggccattacgacaccacccagatgccggggcaggtcggcaacttcgccgtcgccggccaccgcaacggctacgggcagccgttgggcgatgtggacaagttgcaggaaggcgatcccatcatcgttcgtaccaaggattactggtacgtctaccactacacccggtacgagattgtgctgcccacggacgtgcatgtgatcgcccccaatccggaagactccactgccaatcccaccaaacgcatgatcacactgaccacctgtgagccgaaatactccacccccacccatcgatggatcagctatggtgagttggcgtactgggccaaagtgtccgatggtgtgcccaaagagctggctactactgattcgtccggtgcagtgatgttctccaccaccgaaaccccctcgatcgcttcccgcattggctcgctggacaaggtggtattcggcgcgctggtagtgtggctggttctgttcattgccgctgcggtggcatggcgctggccggtgctgcgcgagattcgcgcgggtgagcgtcgccgtccggatgccagcatctatggcggactgttgcgtctgcagcccggcgtggcaccgattcgatggctgctgctggctctgctgctgttcgcggccgccgcggcgctgttccagtggggattcccttgggccgccgccaatatcccattcctacagcagatgtcgaacttcgtggcagcgagctgacggcatcctagtactatggcttgcagtacacgtccctcaaggagagccctatgaccgattccgcgcatattttggtggtggataactacgattccttcgtctacacgatcgtaggctatctgcaaacccttggcgccactgttgatgtggtgcgtaacgacgctatcgacccagccgcgccgggtgtactggacggttacgatggcgtgctgatttctcccggccctggtgctccggccgaatccggtgccagtgaggatatgattcgcctgtgcgcggccagcggcgtgccgatgtttggtgtgtgcctgggcttgcaggcgctcgctgaggtgtacggctgcactgtggaccatgcgcccaccatcatgcatggcaagaccagcttggtggaacatatcgatgacgagattttcgagggcgtggccaaccccatgaccgccacccgctaccattcgttggccgtcgagcccgattcggtgccggatacgctggtggttaccgcgtggacgcaaggcgaccacattattcagggcgtgcgtgtcaagggcaagccgatgtacgccgtgcaattccatcccgaatccgtgatgacccaggacggctaccgtctgctggccaactggcttaaggtctgcggccaagacaacgccgtggccaagtccgccggcctccagcccaaagttacgaagtagcttttccgcgcggcgatactctccccggaatgtgtcgctagaacgaggcttgcgtactggttttgcgacgcttcccgggattgttgcgctgggatagctctttatacagcaaaggggaggggtgcagaagcccttcccctttgtgttgcgtgtatgtgttgcgctatttgcgttgcatatgcgcaacacatacacgcccggcgcttacttgctactcaccggttcactcaccggttccgcccccgttgccagtaccgttgccaccgtctccggtaccggtaccgccgccagtgctgccggccttcgtggtaatggtgacggtcgatcccgcatctacctggctgccagcgccaggattgatgctgactaccacagcggtgctgccggttggaccattggcctgagccttgaggcccacggccttgagcatgagttcggcggtgacgtagtcagtgccagcggtgatattcggcacagcgaccttctccttgcccgtggacacccaaatggtgatgaacccgccctgtgcgatggaagagcccgaatcagggcttacacgggtaatcagaccggcctccaccgtatcggagctctcctgctccacagtgaagctgaacttgccctcatactgctgtagcacgctgtccttcgactgaccgaccaaattgctcggtacggtggtcatgccggaagaaacatatatggtaatggtggtgcccttgggaaccgactgaccggcggcaggatcggttttcgtcaccatatccttggcgatgtcggcgctgtcttcggttttgacggcggcgttcaccttgaacccggcgctttccagaatgctgcgcgcctcttcctggctgcgttccttgacatccggaacctgagtggactgcgggcctgcggagaaccacaccttcacggcagatcccttggccaccttggagccggcgtccgggctcatcttggtgcaggtgccttccggctcggtggagtcggtgtcttgcttttcggtcatcttcaaacccgatgccttgagtttgagctcgatgctgtccttggatgtggaagcgttgcacacctcagggatggtgacggtgtcttccgaggacttgttgccggagccgttcatggcgaacacgatgcccacaatgacaagcactgcaacaatcgctgcgatcaccgaaccgatgatgatcttcttgcgcttcttggccttggccgccgccgcacgctgctgcgcacgggactgcaacgccgctgagttggcaccattggccggtggaatctgctcgaactgaccggtcaccgggttgaatgcttgggtgggttgctgatgcggttccaccggcgtggtgggcaaatcacgttcggcttccttgcgggccttcatattcgacaggtccgtcaacgggttgaacgcggccgccaccggcacgccgccgttcatgtaggtcaggatgtcggtcttgaattcggaggccgtggcatagcgattctggcggtccttggccatggccttggcgcagatcgaatcccacatcttcggcagccccggcaccacggcggatggcggcgtggcgacttcggaaacatgctggtaggcgatggccacggcggaatcgccggtaaacggcgggcggccggtgagcatctcgtagagcacgcagccggcggaatacaggtcggaacgcatgtcgacggtctcgccgcgcgcctgctcgggagaaaggtactgtgcggtgcccaccacgccctgcgactgggtcatggtggctgcggaatcgtccagagcgcgggcgatgccgaagtccatgaccttgaccacgccctgctcggaaatcatgatgttgccgggcttgatatcgcggtggataatgcccatgcgatgcgaatagtcgagcgcgttaagcacgcccaacatcacctgttcgcagtcgcgctggctgagtgcgccgttgaccttgatgatgtcgcgcagggtctggcccttgacgtattccatgacgatgtatggcagacgctcggcatcgccgctttcggaagaaaccagttcttctcccgaatcgtagatgttcacgatgttcgggttgttcatctgggccacggcgtgtgcttcgcggcggaaacgggccaggaagatgtcgtcgttggccagatcggcgcgcatgattttcacggccacggtacggcccagacgggtgtcaagagccacgtggacctcggccatgccgccacgaccgatgagctggccaagctggtagcgtccgccggccaatgcggtgggcatactggtgctcattgcttattccctcccaatcttgaggccggggcctccaaaacaatgcgtggcgtgctggtcactcggcgcggcagtcgattgccggacgtggccatggcggtgtcggccatttcggtctgctgatccagcagacggcgttcgatgcgtgccagcgtacgggacaccaccagcgcgtctttcgggcgatccaacgggtccttggccagcattgacatgacaaattcgcgtaactggacgtccaccgagtccggcagcggaggcacgggattgttcacgtgcgctgcggcgatatcgaccggagtggtgccggtgaacggacgatgcccggcaaggccctcgtacgccactacgcccagtgaatagatgtccgattgcggcgtggcctgctggccctgcgcctgctcgggggagatgtattgtgcggtgcccaccaccatgccgtcctgggtgatctggccctgacccgtggagtagctcacaccgaaatcggtgattttcacttcgccggtgtcggaaaccatgatgttggccggcttgacgtcacgatgaatcacgccgtgcgagtgggccacgaacaggcctcgcgcggtctgaatcaggatgggcagcagttcgatgggatccatcgcgcccttgctgtggaacaggtccgccaacgatttcgaggggacgtattccataatcagaaagccgatgccgtcatgctcgtagtattcgaacaacgcagcgatattcggatgcgccagattggcggaattatgggcttcggcacgcagacggcgtagcttggcctcggcgttggtcatgtccgagcgcagcgccttgatggccacttcacggccgagctgaatatcgtagcctttccagacctcgcccataccgccttgcgcaagacgcgaatcaagacgatatcggcggtgaataagctgtccttcgataagtttcactgctgcaaagcctcctgcatcatcgcgcgcatgatcgggccagcggcgagcgaaccgtgtacatctgtgttatgcaccaacaccgcgacggcgatttgcggatcgtccgccggcgcgaaaccgatcacccagccgtcgatggcagagttgtcgataccgatttgtgcggtaccggttttggccgccaccttgatgccgtcgatggccagctgcggattggcctcggacaccacgctttccatcatcgtggtgagcttgtctacggaatccttgctgaacgcattggccatggtctgcggcttggtctgcgaaagcacggtgagatcggcggcgcgcacacgatcgaccagcgtgggctgcatcagtttgccgttgttggcgattgcctgcgcgaccatcgccatctgcaacggcgtggccgtggtgtcgccttggccgatggacgccagcgcaagcttgtcgtcggtcggatcagaggggaatgtggacgcggtggccgtcatcggggtgcccgtggattcggtgccgtcaatggtgatggtgctgccgaaaccaagcttggtggccatgtccgaaaccttgctcgcgccgagtttcacgccaagctgggcgaacgcggtattggacgaccatgcgacggcctcttgcagggagatctgcccgttgacgccatcgcccggtgcctcgtcgttcggcaactgtgtggcggttcccggcaaggtatagctggcgcccgcaggaatcttcgtgtccgtctgataatcgccggtttccagcgcagccgaggcgacgatgatcttgaacgtggaccctggtgggtacagctgcgaggtggcgcggttgattagagggctattttggcccgcagaaagttcgttgtaggcctgagacgcggctttggtgtcatgggtcgccagtttgttcggatcataactgggcgtgctcaccatggcgaggatacggccggtgttgacttcgatggccaccgccgcaccatcgcgcgtaccgagctgatcgtaggcaacctgctgcagcttggggtcgatggaggtttcgatggacgcgccctgattcgtagtgccggtgagcatggccttggcccgctgccagatcaatgaatcggcctcaccgttgagcagcatgctgcgggaggcttccaggccgcgatcggcggtctggttgatggagaagaagccggtgaccggagcatacagaggaccgttggaataggtgcgcaggtatttgaacgcgtcgttgaccggttcggatttggccatgaccgtgccgtccgaggccagaatggcaccgcggtaggcaccgagctggtggtacagcgaacgggcgttgcgcggatcgttgttcagcgcgttggcccgtaccgccatgatgatggtggacgacaggccgagaatcacgaacagcgctaccacggcggtgaaaagctgacgaagatatttgttcatacgcgagtgcctccgttaacgggaggaagcgggggaatcgtgccggtaggcgtgtacggttcatcggcttcggcatacgacggagtggtggtatccacgatggggtcgtcaaacgattccgactcggactgcgacgccgtagccgacgcgctgcgaggctgaacgatcggctcagtggcgcgggcccgggcctcaagttccttgttgcgcagcacggccaaagcctcgtactggaacgtatccgaggtcagctccggctcgggcgcattggccgaattcgagatgatgatgagcagggtcgcgagaatatagttggcgatcagactggagccaccggccgccatatagggcagggtcagaccggtcagaggaatcaccagcgtgatgccgccgaccacggtgaacacctggaaggccatggtgaacaccagtccggaagcgagcagcttgccgaagccatccttgattttcatggcggtgataaagccggaggcaatgatgagcaggtagagcatcaaaatggccaggacgcccatcagaccgagttcctcgcccagagaggcgtagatgaaatcggagttcgcaaacgtaacgagcgaaggatggccttggccgagaccggtgccgagcatgccgcctgatgccaggccgaaaatgccggtgaccagctgccaggagccgccgggggtcttgttgtattgctcgttgctgaacgggtgcagccaggcatcgactcgctgacccacgtggctgaacatgcctgcggccagcacggcacccgcggcgaacgcgatcagaccgatgatgatccagcttttacggccggtggccgtgtacagcatggccacgaacatggcgaagaacataagcgaggtgcccagatcatgctgcatgatgagcacgcccatcgaggcgatccacaccacgatgatcgggccgagatccttgatacgcggcagctgcagaccgagcatcttcttaccgcccacggccagctggtcgcgatggtcgaacaggtaggcggcgaagaagaacgcaaggaacagcttggcgaactcgcccggctggaactggcccagtcccggaatcctgatccaaatgcgcgcgccgttcacttcctgaccgacaaacggcagcatcggggcgagcagcagcaccaagcccaccaccatcgacacgtaggagaagcgccgcagcacgcggtagtccttcaggaagatgatgagcagcgcggaaagcacgatggcgatgcacagccagatcagctgacgttgggcaaccgcccaaccttcgctctggtcgatgcgggcgatcatggtcacgccggtggcggtcagcagtagcacgcaaggcagaatcgactggctggcgtacggctggaagcgcacaatcagcccccacagcaccagaaacagcactacgaccaatgccagcatgccggcgtattgcatagggaattcgccggcggtgcgctggaacatctggatgaacgccaacgcactgattgccatggcaatcagcaacaaagaaatctgacgtagacgggtaacgatcattgagaatctcccgtggccgcgttgtcggccgctccgataccggatttatccgaggaatcggatgagcttgacgaaccggacttgtctgatgaggagccggactggctggacgaatcctcggtgctgtccttggaatcgctctgggagctgtctttggaactgtccggggaattggacgcctcggccttcttggcggcgtcggcttcctgctgcttggccagtttgcgcatttcggtgcggataatacccacatgcgactgcgcttcgtccaacgaaccgactgtgatgccttggctcagctggtcacgccatgtctgaggcaggtccgcggtggcgatattggtggtctgcacttcgtgcgaaagctcaagtccaaagagattggtcggcacgccacgataaatggccacggtgccgttgctatctcccacgtagtagtgcgtctggctccacgtgtacgcgccccagccagcgccggccaatgccagcacggcaagaatgcaggtaataatcaccgcaagcttattgcggcgcttcttggtgcgcgtggccttcttctgctcgacctgctcatcgcggatggctttggccacatccgggtcgttggggtcggcggacaggcgcccatccggcttttgcaccaccggaatctcaccggtatcgggattggctcgttcaccggtctcctcgcggacggtggacggctgcaccacgcgtgtggacgacggtttggccgtggtttgcgcggtctccgcctcgtgcgcgctgacgggctgaatcaatgctgcggcgcgctgggcgggggaatcatcctcacgcagtgcgggcgcggtagccaccggctcgttgacgatgtcggcaatcggctcaagattacggctggcggcaccgccgaccaacggcgtttggtgcggcagatcgaacgcatcggcatccaacgccaacgtggcatccgcaataacggccgtgacattatcggtgctgcccgcccgcagtgccatctgcaccagacgctgcgcgcattcgccctgatcggacagcgtggtcatcgtctcttcgatggtggaatcttccagcacaccgcacaggccgtccgagcacagcagccaacggtcggcggggtgtgctcggcgaatcgaaatatccgggcgcgggtcaatgtcaaagtcgccaagcacgcgcatcacgacgttgcgctgcgggtggttcttggcttcggacggggtgatacgaccggtgttgatgaggtgctgcacgtagctgtggtcgcacgtgatgcggctcaggtgtccgtcgcgcagcaggtaggcgcgtgaatcgccgatatgggcgatgacccagtagccggccaccaatgccactgcggtaacggtggtgcccatgccggcaagcttgcgttcgcgcttggccttgccgacgatggcgtcatgcgcggccataacggaggtctccatcatgcgggagatcgtctcgacgttgccaccggtgtcgtcctgctcgatgtgggccagtgaccggatggcgatggaggatgccgtatcgccgccggcgtgaccgcccatgccgtcgcacatggcgatgagatgctcgccggcgaaggaggaatcctgattgttcgcgcgcacggtgcccacatcggacaccgtggtggaatacaggaacagcggttgtgaagcggcggattttggcatgcggctacctcagttcgaaggtggtggcgccgatgcgcacaggaatacgagcgggcaggatggtggggcggctgatgcgctgctggttgaccacggtgccattggtggagttcaggtcttcaatggcccactgcccggagcgcgtgtcacggtagacacgggcatggtgggaagacacgaattcgtcatcgagcaccacggtgttcgaggcggcgcggccaagcgtgatgtcggcttcggccagcggcacggagctgccggcaagcggaccatcgatgatgaccaacagggtaggctgcgccgaggcggcggacgacgcggaagtgctgggctggcgatgcgggcgcggcgcagctgcctgcggcgtttcggccttggccttatgcgcttcacgctcacggcgacgacgcgcgcgcgaaggtcgcggactgaacgtctcgatgtccttgcgcagcgaacgtacggccagccagatgaatatccacagcaggatcaggaatccatacttgagcagggcgaatgtcagttcggtcataagtggacgactttcgggcgtgtgctcgactactcctgggcttgggcggaggcccagtacaggatgcgggtacggccgatggtgatggtgttgccgtcgagcagcgtggcggcgggcacttggtggccctctacgtacgtgccgttggtcgaacccaggtcgcgggcgatcacgccgttatccgtgatgtcgatttccaggtgcttgcgggagatgcccggatcgtcgatgacgatatcgcaaccggaaccgcggccgattaccgtcttgtctttggtgagcaggtactggttgccgttcacctcgagcaccgggctatcctcggtctgcgcatcggtggtgaccggcacggcattgccctgcacggattcggaggtgaggttgaagttgcccttggacaggtcaaggtcttcctcgaagatcacgatcaccgggcccacgaaggcgtaatgctggctcttcgcgtactcggtgaggttatcggccagttcgttggccagggtctcgctaccccatgcctcgatacggtcgaagtcaggagtactgagcttgaaacggtattcattcggggccaccgtgcggtcacggcccacgggcatggcctcggcgtcaatctcgcgctccaaggcgctggaaagatcgacaggctgcaggtctttggagccaaacttggcgaatactccgttgactgcaccctccacgcttttttcaaaacggtcgagaacgctcatagtcctccctttctaatcttcacccatcctacgcggtgatgggaatatgagacaaaaaaccggtctttcacgtgacgatgagtgcaaaatatccaaaaattcagggcggaaatgggtgcggcgcaccacccgaggtgctttaccggtggagcacctcgggtgggatgcgcgtgttatcgatttgtcaggccagcgcgtcgcgcaggaaatcgcgctggagggtgagcaggttttcggccacggtctcgtcattggtcatatgggtgatgcccgtcaacggcaggaaggtgtgcgggcgacccgccgccatcagggcttgcgagaggcgcaggctgtgggcgatggtgacgttgtcgtcggcgaaaccgtggatcagcataagcgggcgctcgagtttcggtgcgtcctgcacgatgccgtttcggtagtagacatccgggtcgaggcccagatagcgctcggtgtagtgcgtgtcgtacagcgtccagtcggtgggcggggcgccggcgcatgcggccttgaacacgttcggcgcgtccagcacggccagtgcggacaggaagccgccgtacgaccagccgatcatgcacaccttgtcgaggtccggcatgggaatcgcctcccgctggcgggaggtggcgcgaagcgccggtgggtggttctcggcgtctgcctgatcgcccgcagccggctgtgccgcacgtgattccacatcggcgttgagccgggcgacggcctcgggcagggcgttgacggcctcgacctgatcggccagcgttacgtccttcatatcctcgaagatctcgcggtcccatgccgggccgcggccggtggtgccacggccgtctgccgtgaccaccaggaagccttggtcggcccaccactggccctcccagtagaaggactgcgaggcgatgacctgctggaagccgggcccgccgtacggcttcatcagcaccggcagcttctcggcgtgcgcgtacgggctttccgggctcggcgcgatgatcgccgtgtacagctggtgctcgcccagtcgcgtaaacgtgacgttcggtgtaaagccgggttcggccgccgtggacgcgatagtggcgctctgttctcccagaatatgccgcatctgggcgcgggcggaacgcatatcgcggccggagaccacgatgccgcgctcgccgcgcgaggcggtccattggccgggatcggtcgtgaccggcgtgatcgtgccgttgtaatcgatactcaccacgtcgaaactgcgggcgtcgtggtcgccgaatacggactcggtggcggccgcatcggcccaagcgtccggcacctcaggcgcgatttcgggcgcgcgctgtaccacggccagcacatcctcgtcggtcacggcgagcaccgtgcgcacgttccagccagccggcgtgaacgggcggccgtccattgtcagacggttggtgtccgtggccatatcgttgagcgagcacaccagacgaccatccggcgtgtaggcgggcgtgccgtgaaccaggtcgatccactgctcgttcgcgtgctcctcaagcacacgcgtggcacccagcgcggccccatccgccgcgactgccacctcaagcacctgatcgcgggtctgacggcggttctgcaccagcaccagcggatcgtggccgcgacgccagttcacggcggccacatactcgtacgcctcgcgatcccaatccacatcggcgttgccggtgatgcctgcgtaccggtcgttctcatcgaacgccagcgtgatcacggtcagatacacgtcggcattgcgggtcagcgcgcgcgggtagcggcggccggcgtccggcttctcggggtcagccggatcgctgatgtgccaggtcggctcgtcggcggtgtcgaaagactcgaacagcacatgctgcgaatccggggcccaccagaaaccgtcgtaccggtccatttcttcgccggccacgaactcggccagaccgattttccacgtgttttcggccggattgccgtcctcatcctccacgctcacgccgtagaccgcggtgatgcggtcacctagctcgccgccgatatcgaccagcatcaggtagctgcccgtggtgtacagcacatgttcgccatccggggcgatgcgcgggttcagcaccggcgtgtacatcgccgggtcctcatcgagccattcgccggccagttcacgggtgtgcggctcgggtgcgccggtctcgtcattccaatcgatgtcggtcaggaacaggcggccgttgatggtgaacacgatgcgattgccgtcgtcatctgcggagtatccgacgatgccggtgccgccttcgcgcgcacgctcgcggcgggccttctcctcggccggcacgtcctcgctgtcggcggttgcgcccagcagttcgcgcgggtcggccagcttggtctcatggtgttcgccggactcgtcgaaccagctcagccacagtgcggtcaccagatcctcggggccgtcggagcgcaggaacagggcccgcgagccgtcgcccacggtctgtgcggagcgcggtgcgccgcagccgaagcgcagcgtgcgcgcccggaggcgtgggaaatgcttgattgcgtcattgacatcattggtttcgctcatacctcacaacctacgcgcctgtgcggtcagtggcgcgcaggcttgcgacgcattcccgggaatgtgtcgtggtgtgggtgcgaggtgtgggcgtgaggcttgtcctaagatgggaaccatgcaggtgacgatgatcgacgaaaacaagtacgccgaaacgatgaccgacgtggtgctgcccgcgctcgaacaatgccgcgaggagggctggttcgatccgtccgccgccgaacgttcggccgggatcgagccgctgtccggcattatggacaccggcggccgctcgggccagctgcactacctgtgctacgactccgccaaattcgacgcgattcgcgagcaaggcgccaccgccatcttccgcggggccatcgtcatcagccacggcttcaccgagttcgccgagaaatacgacgagctcgtctggtattttctgctcgccggctactcggtgtgtgtactcgagcatcgcggccacggcaagtccgcgcgcgacgtggacaatcgctgcatggtgtggattgatgactggcagcgctacgtggccgatctggccggcttcgccgaaaccatcggccagcagtacgcggccggcatgccgctgaacctgttctgccattcgatgggcggcggcatcggcgcggccgtgttggagcgataccccaccctgttcgacaaagcggtgctctccgccccgatggtcgcccccgccaccggcatgccgctgggcgtggcccgtgtgctggtcggcgcgctgtgcggactcggcttcggcaagaagcgtgtgttcgggcagtcggacttcacgccggagttctcgatggaaggcaacgagggcgcttccgaggcgcgtgaacgctggtacttcaagctgcgttgcgagaatagcgaataccagacctactgcgcggcgttcgaatgggtgcgccaggcgttgaagctcaaccgggccatactgaatccgtccgcctgcgccgaagtggagacgccggtgctgctcttccagtccggacgcgacatctgggtactcaataagccgcagaatcacttcgtccaactggtcaaggacggcggcggcgaggcgaacatcgtgcgcttccccgaatcgcgccacgaaatcttctccatgcccaacagcacttacaagccctacctcgaaaagatcctcggcttctacgacgaccccatgattgcctgcgccgcgtactgatgtagctcttcacccattgttcaccgtgcggtcaccttgtggcccgacccgctttagatggcgggagagccatggaattatgggcataatgtcttctctccgccgccgcggttgcggccgcggtatgtgccggcgtgctcgcgttgaccggttgcacggcgttcaataattccgatgacggcacagcggacggcaacggcacgtccgccaccacgcagaccttccagccgtccggcggcaaaccgactgccaccctgagcattgcctccggctccgaaaacaaggaagtcgccgtcgccatccagaaagcggccgaccaatccaacgtagccgtgacgatgcactacatgggttcgctggagattatgaacgcgctcaaggccggcggccaggatcacgacgccgtctggcctgcctcctcgatgtggatttcgatgggagacaccaagcacatcgtcaaagacgcggccagcacctccaccacgccgatcgtgttcggcatcgccaaatccaaggccgtcaaactcggctgggctgacgacaccggcgccaccaagcccgtctccaccgcggacatcctcgccgcggtcagcgacggcaaactcacgttctccatgacctccgccacggtgatcgacagcgcgctcaacgtctaccagaccgcgctcaggaaacccagctggaccatttgggtggtcgattactccggttcgatgtctggagagggcaagaacggcgtggtcaaaggcctgaacgcggcgctcgacccggaccaggccaagaagtcgtacatcgagcccgccagcggcgacgtgaacattctcatcccgtttgaaaccgaggcccaccgcccggtcaaggccactggcacaagcaccagcaacctgctgcatgaggccgatgccaccgatgccagcggcggcaccgatatctatgaaggcctgctgagcgcgctcgacgagctgcccagcgagtcggaagcctcgcaatacaccaccgccatcgtgctcatgaccgacggccgctccaactccgatcatcaggacgaattcgaaagcgcctataagtcgcgcggccgtgatctgccgatcttctccatcatgttcggcgatgccgatcccagccagctgaagtctctcgccaccctgagcaacgccaaggtattcgacggccgctccggcgacctcgccgccgtcttccgccaagccaagggcttcaactgatgctccaggtaatctgtggattcgttgtcggactgctgctcgccgggctcggtttcggactggtcggcggcggagtgcccggcctgatcgtggccgtggtactggccgcacttgggtatatcgccgcctccacgctcaccgagccggagcgacgcatcggcaaaatgctggtttccgccttgcccaacggtcagaagaccgccgatacgatcgacgcggcgaacgctcgactcaactcgatcgccatgctcaccaagcaagtacgtgacccagccgtcaaagccgaagccaacgacttcatcgccgctaccaaaggtttagtgcaatacgtgacccgagacacctccgcctacccgacgttgcgccactacatcaccgtgtacggcgagtagaccgagaaactgttgcgctcctacgtggacgtggaaagttccggcgcacgcgatcagatagccacggcacgaatcgaaaccatcgaggcgctgcaagtgctcgaacagaccgccgccggcgaactcagccgggcggtaagtgccaagacgttgggcattacggccgactccgacgccatccaacggttggcccgcatggatggatacgacgacgtcgcaccttcgcctgtgccttcctcggctgctgatgaaggacggcatgcgcccagtcagactccatctggtggcccggctcaccagtcggaccagaaaacggacgcacaatgaaactctccaaatcaaaaatcatcggactgatcgccctgcttgcggtagtgggcgtggtctgcggcacgctggtgtggcggcaatcgcaaccagcgccggccgaaccgaccgaacaggtgagcatcaccggctacctgggcggcgagaaaatcggcctgttcgatgacgccaagttcaaggcgctcgccgccaagcaaggcattgccatcgactatcgcaaggccggatcgctggccatgatggatgcggaccggaaaggcatggattacctgttcccctcctcgcgcgcggccgtcgaatacggcaatgcgaaaggcgtcaaggcccccccaaagcgacatcgtcttcaactcaccgattgtgctatacacgcacaaggccgtggcggacgggctcgtgaacggcggacttgtgaccaaggacgattctggcgcgtaccacatggatatggccaaagccgtggacgcgatggtcgccaacacaacctgggccgacgtcggatacacggcaggctacgggcagttccgcatcgactcgaccgatccggtgaagtcgaactcaggcaacgaatacgcggcgcttcttgccacggtgctcaacggcgggcagccggccatggtcgattcggtggcgcgcgacggcaagaccatcgcctccatcttcgccaaatccggctggatggagacctcttccgaggattcgttcaaccagttcctgaccttgggcgtgggctccaagccgatgatggtgggctacgaatcgcagctgcttgatttggccgtgaaccagccggatgcgttcaagcagatcaaggacgacgtggtcatcgtctacccgacgccgaccgtgtggagcacccacacgctgatggccttggacgagaaaaggcggcacactgctgaacctgttgaaaacaccggcggtgcagaagctggcgtgggagcgccatggcttccgcgcggccaacttcgccggcaccgattcgatcagccgattcggcgtggccggcacgctcgaccagatcccggccgtatccgaactgcccaacaacgatgccatgcaacacctcatcaccaccctccaatccgcgcaagccaaactcgtggccgacatctccatgtacgacacgatgtacacgcagaacgcccagcaataccgcgagctgaaaatgaccgtactggccggcaagaaggcgctcgccgacttcaacgccaaccagctgccagcgctggaggccgaggccgccgccagtggcgacgccatgcaggcgcaagtgctgaagaacttcaagtccaagctcgaccgttttgccaagcgactcgacgacctcgaccgcatcagcgtggttaccttgcagaccgcgccgcagatcaaaatcatccagaacgcggaccagaccatcgtggacaagatcgacaccaccatctccaccacgattccggtgtggaagagtcagatggtgatcgcgctgggcctgtccaaccagcgcaaggttctcgacctgcagaacaaggccgacgatgtgaccaacaagctgctggcgcgtaacgcggccgccctgcacaagggtgcagtggacgcggaaaaggccaaccagcgttccgtggtggaaatcgacacgctggagaagatcaacgccgaactcgtcgccaccctgaaggagaccgtgcagatccagaaggaaggcaaggccaaccgcgaggccgcccaggtcaagatgcgccaaatcgagtccgacctcaaaaacgccttgctcgaaaacgcccagcagatgtgagccgttcgcgcgccagcatgctcccgttggcggagtttgcgggaacgtgcaaccatgctcccgttggcagaggtatatgagtacgcctactggtgtgcgtatatatgctcccgctggcgggagctggcagccgtaagactggctgagggtggtcacggcgctcggctcggccggctttgccggcagccattcccgccgcaatttctctgtgggcataatcccggaatgattgccgcgctcgggaattggatgaagtgaaggttaaaggttgagagcccgggagggttccggaaccggccacgataaccgctgctagccccgcgatacgggttggcggccggcagccaagccgattctctcctaatcaaggagtaccgattatggcaatgtttccggctttgatgaatgacacgatgttctcggatctgttcgatgatccgttctttgagggttggcgcaacacggacaacacgatgagtgccgtaatgcccgccaacatgatgactaccgatgtgcgcgagaccgacaagggttacgacgtcgacatcgatatgcctggctttaagaaggaagatatcaaccttgagctcaacaacggctatctgaccgtgtccgcctcgcgttgcagcgagcatgaggacaaggctccggccgctgaggacgaggcttccgacagcaagtgtgcttgcgcgtccgattcgggcaagtggctgcgtcgcgaacgctacatgggctcctgctcgcgtagcttctacgttggcgaggacgtgaaggagtccgacatccacgccagctaccggaacggcacgctgtgcatccaggttccgaagatgcaggcccagccgcaagtcgagtccaagcaccaaatcgcgattgagggctgacgatacttgattcgtcccgaagtcccgcttcgagtagctttgccccctctgacgagggggctcctgcgaagcgggtgggggagagataaatcgtaaccaaaccatgcttcccacgccgtctgccctacgctttcaacgccgactaacctgacagacggcgggaaacatagccaatgcaaatgccgggtagggatttaccctacccggcattttgctgtttcaatcaccgaaccccaccctgttcgcgcgccggtcgcgtgccgttctgccgctgtacacatccgatgggtagagtgacttcgaaacgatgcgagagaggcggacatatggcgaacggcgcacagaacgcaagcggcacaccggcaccggcggcaagccattccggcggccacgtcgtatccgcgcgcgccacgaccatcggcctgatggcaatcctgctgtggagcttcatggccggcaccgtgcgcatcgtctccgaaaacttcggcgccacgcttggctcggccctgatctacacggtcggcggcatcctgctgctgatgttccggcgcccggccccgattcgcgagttccccaagaaatacctgattatcggcggcctgttgttcgtattttacgaatcgtcgatatccctctcgctgggtctggcctctaccgacgcatcctcggtggaagtgagcctggtcaactatctgtggcccacgatgatggtgctgctgtcggcgggcgtatcccatcgcaagcacgcggtcgtcaaggtgctgccgggcgcgatcgtggccactgccggcgtggtgttggcggtcggcggtaattccgggctcgactggcatgcggccgtgcagcatatcgccgccaaccctttgccctatgcgctggcgttcgcgggcgcgctcgcttggtcggtgtacgcggtgttcacgccagccatgagtcatggggtggacggcacttcattgttcttcccctgcgtggccgtggcgttgtggattatccacttcgcgtccgggcaggggtggccggccgagccgccgagtctggtcgcatggctgtttgtgttgattgccgcggcggcgattggcggcggttatgcctgctggggctatggcattctgcatgggtctatggagcggctggctattgcgtcctatgccacgccggtgctgtccaccggggccagtgcggtactgctgggtttggcgctgtcgctgccgttttggtgtggcgcgctgctggtggccgccggatcggtgctcaattacttggtcagtgcgcgcaaatagcggggtggctttgctcatggggcggtaataatcccatggggcggtaaaaccctcatggggcggtatcccaaaatggctttattctgccgtttcacaatttcttcaaaccgccccatgggccttttaccgccccatgggtaaattaccgcccgatgggcagcagcaacttactcgccgcggcgctcggacgggcggcgaatcgggtcaagcagcgtattcggatcggagatgccgaacatgctgcgcccgccggtggattcagggtgcttggcgagaacggccagcgaaatcgcccccggaatcataatgatcaccaaaagggccgccaatccccagttcacgaagaatccgagccccagtacgatggccaccacaaccaccaccgtgacgataatcgtcaacagtgctcgacgtgggttggtttccctggcccaagaggtgctggctgcgggttttgctgttgaactggccgcggcgtttgtggctgttgtgccatcagccgtgacggtcgtgggccttgccgccgcgctcgtcgcggggccagtaggggcgtcagacacgttatcggcggcattgccggtcgctgctggacgttgttcgtttgcgtgagtcatatccaccagcatattccctgcttccggctgaagctgggacaagcctgcgcgccgctaatccagcgctgacactggccttgagctgcggacgtccagaccggatgtgaacaggtgctgaacggagtctggggaaaccatgagaactcgcgacaatttttgtgaaattgggtgacgctctatgaatcgcgcgctagtgttgcgtgagcttacaaggcgaggagcctggagcgcggggggtgaaggatgaagaactccgtttggaaaacgttcatggaattgtctctggtccgcggaatcgtgccacggaccgtgttcggactgaccgcgatcgcggcaatcatactggttattggactggcgctgagcaagagcaataagcgcggccgcctgcacccgctgattgtctcgctgattgccgccgtgctcgccggcgcggctggaatgctggttgcatggctggtgtccgacgtgtttatggtgtttggcgtatcgctgggctggccggtgatcttcaccatcgcgggcggcatcgccggcgtcggcttcgtgatcgccgcagccgtgaccatgcgcggagcccgccgtgtgctggccatcgtgctggtgccgctggtgctgctgtccaccgcgctcggcgtggacttgatttacggcgaataccagaccatcggcaccctcgtcggctacacgccgtacgcctcgctcggctcaatcgaggtacacaaggccgcgatgagcgtcagcgactggcgtagcaaggcgcagaagggcagcctgccgtccatgcccagccaaggcaaggtgctcaccgtcgacattccgaacgccaaatccaacttcacggcccgcaaggcgatgatctacctgccgcccgccgcgctgtccgaccgtccgccggccttgccagtgatggagctgttggccgggcagcccggtagccccagtcgcctcatcgacgccggcaacatcgccgccacgatgaatgcgtacgccgccaaacatgacgggctcgcgccgatcgtgctcgtgcccgaccagaacggcgaggccacgcacaacagcctgtgcgccgacaccacgcaaggcaacgccgaaacctacctcaccacagacgtggtgaactgggccaagaagatgctgcccgtggccaaatcggcccgcatgtgggcgatgggcgggttctcgcaaggcggcacctgcaccacgcagctcgtcccgcgccaccccgacatctacggcgcgatgctgccggtggacggcgaactcaagccgaccaatggcagcgtcgccaagatggtccaggagtatttcgccggcgaccgcaaggcgtacgacgaacaggtgccggtcaacgccatcgccgccaccggtacgcccgagcaggcgctgttcaccggtgctggcgaacgggacaaggaatcgattagcaacatgcgcacgatcgccgacgccgcgcgcaaagccggcatggaggtcaccgagctgatcgtgcccggcaccggccacgactggcacgcggtgcaggcggtctggcggcccggtctcgactggttcggcgaacggaccggcttgggcgagatgacgaaatcgttgaaggagtacccacaagtggaggtgttgcaatgagcgaagaatcgcgtaagcacaacagtcatgcggcggaaagctggcgcgaactggccggcgacgtgcgacagtgggcggacggtcatcgactggccatcactgccacggtggcgctggtggtgctgaacttggtggtgtggctggtggtcgcgatggccggattcgcgttcccgctgcggctcgacaccagcatggccgaattcgatttcggcaaactcttctgcacgctgttcttggcgcgcggcgtcatccagctcattcttgatgccgcgctgtggctcgtcatgctgtcaatcgccgagccgtggcttggccgcgcacgtaccgtcggcaccgcgctcgcctgcgcgctcggcggcgtgatcgtgggcctgaccttgtgtgcggcggccggatggctgttccaggactcccaattcgtctcccgcatgcagttcgccctgagcccgctggtgttgccggtcggcgcgcttatggcggccagcgcgttctgcagccatctgttgcggcggcgtattcggctgatcggctacgtggcgattctggtcgcgctgctttacagcggcaatcctggcgattactgcattctcgccgccgcgctgatcggacacgcggccggccgcgtgatggccgggccgcccgcgcatgccgagaccggctggcactggctgcgcagcacctccttcgaggcgcggcgcatgtttgcggccatcgccgtggtgctggcgctggggccgatcatcgccatcacctcgcataatcacgcggggccgctcagcacggtcggcctgctcatgagtccggtctccgttgacgacggcacgctcgcgcgctgcctggccggcgccacgcacagcggctgcttcctgcaattcgacctattgcgagcctcgatgccgggcgcggtactgcgttcgctgctgcccaccgccgtgaccctggtgctggcgtggggcctgtatcgcggccgtcggttcgcggccatgtgtgccgtggccatcaacctgttcactgcgggagtagccatcgcctactacctgatcgtgccgctgagctttgcgccggacggcatgacctcactgctgcagcacggcgcgatcaccgcctgcgtggcgaacgccttgccgccgctgttctttgccgtcgccttgactgcggcgttgaagcatttcccgattcgcgtcggctggcggcgactgatcggcggcgtcggcgccatcgtgctggttctgctggcgtgcgccgccgtgtacctgatgtacggcattgcccagccggacgccttctcgccgcgcgccacggcctcgtcgctgttggccgaactgccggggcgcttcctgcccatcggcttcctgagccatatgaagttgtcgttcgtgccgcgtaccccgatggcctcgatcgtgtatcagggcgtcggcctggtgttctggatcgtggtgctggtcgtggtgatccgctggatgagcgacgtgagcgaatcgaacgagcgggcgcaggcacgcgccgagcggctggtcgaaaccggcggcgaatcgatgagcttcatgactacgtgggaaggcaacagctactggctctcgcccacgggcaaatcggccgtggcatatcgcgtgctcaacggcatcgccttgacctgcaccgggccgttcggcgagccctccgagtggatggacgacctgaccggcttcacccagtattgcgtggagcggtcgctttcgccggtgttctacagcgtgcatcgcgaacagcgcgacgcgttgctggaggccggctggagctccatcgaggtcggcagcgaaatggtcgtggacccgcgcggctggaagacgaccggcaagaaatggcaggatgtgcgcaccgccatcaacaaggccaagcgcgacggcgtgaccgatgtgcagtccacgttcctggaagcgtcgctcgatgtgcgcgagcagatcgaggacatctccgaggagtgggcgcagctcaaggcgctgccggaaatgaagttcacgctcggcggtgtcgaggaactgcgcgacccgcgcgtgcggctgctttacgccatcgacgcggacgggcgcgtgctgggcgtcaccagctggctgcccacctggcgcgacgggcgcatcgtcggctggacgctggacttcatgcgccatcgcaccgacagtcccaacggcattatggagttcctgatcgcgcgcatggccgagcgcctgcgcgacgaggggcttgcggatcctgagcatgccgtggagttcatgagcctgtccgcggcacccttggccggcatgaaccccgagcgagacaatgcccgggaaggtggggtggcggccggcgaaggcacgcaggtgctccaacacgcgctgcagatcgtggccgactggatggaacccgcctacggcttccactcgctgttcaacttcaagcgcaagttccagcccgccgaagcgccggtctacgtgtgctacccggacccggcggcgttgccgcagatcgggctcgcggtggtgcgcgcctacgtgcccagcgtgacgcccgccgaagtggccggcatgctcagtacgctgcggtcgtgaaggtgtgcacacgggtacgcaggctagccgattcgagcctgagacggggtatctgctttcagagaggtacatttggcctcttgcggacaactaactgccttcaaagaggtacctgaactctgaaatcccgagtatgagcgttgcaatgacggcgtttgtactcgggatttcccgtattcggtacctctttgaacggagaaagcattctgcagaagcccgaatgtacctctttgagcggcgaaagcccagcgagaagggcgcagaaggcgctatctccgtttcgaggggttgatttggcctctccgggaggtctactcctgcttcgaggggctgatggccgagtattcacgctccaaaatcggcggaatggcgttgacgcggatgggcttttacatgcggtctagctgccgaccagccccttgaaacgggagtagacctcctgcgaaggccgaatcagcccctcgaaagcggttttgccggtgcagaggtgtcgttgactgcatcgcgagccgcctcgacgtagtaacgtggggcgcatgagcgaacgtaacgaacacaatgacggaaatacgcaaaccgcatacttcgccggcggctgcttctggggactggagcgctacttccagaacgtcgacggcgtcacggacaccacggtcggctacgcgcaatccaccgtcgaatcgccgacctacgagcaggtatgcgcgggcggcacggatgcggccgaaaccgtgaaagtcgagtttaacccggcacaggtcagcctgcggacgctgacattactgttcctggaggtcattgacccgttctccgtggaccagcagggcgaagaccgcggccggcagtaccgcactggcatgttctacacggacgagacgcagcgcgccgtgtatgtggcggccttggagcagctggtcgaccgccagccgcagcgcccggccgtactggtcgaaccgctgcgcaacttctacccggccgaggcacatcatcaggactatctggtgaacaatcccggcggctactgccatgtgccgatcgccgcaatcgcgaacgtaaaacgccgtcagaagtacgtggaacgcatctgggatctgacgcttgagcagttcgcggtcacacagaacgccgctaccgagcgcccgttcgtcaacgagtatgacgaggagtttgagcccggcatttacgtggacatcgtcagcggcgagccgctgttctcgtcgcgagacaagttcgattccggctgcggctggcccgcgttctctcgcccgattgccggtgacttgctgaccgagcatgaggaccaccgcattccgggccgcgaccgcatcgaagtgcgcacgtcggacacacagattcacttgggccacgtgttcaccgacggcccggccgaccgcggcggcctgcgctactgcatgaattccgccgccctgcgcttcgtgccgcgctcgcgcatggccgaggaaggatacggcgactggatttcggttgtggatggggatgagcaggcatgagcatggagaatattgcgggcgctcgcaagcccgccaagcgtgaggatgagcacacggtcgccggcgagcatcgcatgatgcgccgcgcgtaaccgtggcatcgccgccacgttcgtgtcgcataattgctgcccggccacgtcataattcgccgtgccgcgtgggagcgctgtggcggctacgacgagtcgatgcgcggcgacgccaccgccagtcaagccttcatggcccaccccacctacggcgacggcggaatggccgccgccgtacggttgaggagctgatggtcagccggctaaatgccgatagagctctggatcgattggccgggccaaacgcaggaccgacagggtgaccttcacactgccctgtccggttgcgtcaggcttggtggtgagctgaggattctcaaacgcagcgacgtggccaacgtagtagtacttgccatcggcctcttccgccttgcgcatgacgaatagcgggacgaaatgtgtgtggtcccaattcgggccaatgccgctaagcgcccatcggaattccggagactgcggagtgcgtccgttcttgctgaagtatttcatttcctgtgtgctcaggaattcatcctcgtattggctggccgcgtatttcacgaagatgggcatggtgttggtttccttgtcgagcaggtaaccacccacgttttgcggagtgttttccttcttccatccgcacaggcgcatgacgtcagccatggaatatttgcgctcgtacaagaacatgtggtcgaagacctgttgcctggcggcggcctcgcggaacatatctcggcaattggccataccggtgcgcaaagtgtccgcgaagaagatgcggaacgttcggttcgtggcaagtatgtcggcgaatctgctgctcaaccgatatgcggtgtcgcttcctgtgccggtgctgttcaaggtttcgaccaatggctggttgccaaaacgattgcagttcgggccggtgaaatatgaataatcgagcacgctgatcgcagagtcgaattgcgcgtctgaaccatcggccagcgggaattcagtacgaatcgcatcgagcagttcgctgcggccgattgacgagcccgcactccaatgctgaggtacgtcgtcgtcgagccgttcgctgacgaaatggcatagctgagcaagaatgaccaattcgtgcggtcgcaatccgggcagcagcagctccgctgccatcttgagtatcgcgtcttcaacgtcggtcaccggctccaactgatcctcaaatgtcgcttcatgatgtttgcctttgcccaggcttttttcacgggaacgcacgaaatcaagatagttgctgcgcttcgatgcgatggtatacggcagtgaggggtcgtagttatagatgtccgtaagcatggggatgcggcccagctcgtaacggacttggcgatactgttcggacagctttttcatgtcggaccagtcggcggtgtccaaagacttaaggatgcgctccttggcgatcgggtcgaaactgatggacgacaggccgattgactttcgctgcaggttcttgcgagccctgtcgcggtcgccagtgttgccgtataacgccaccggaatcagatagttgttgttgtaattgccgatgaaatcgataaccacaacgctttctttgtgagggaatttgcgcagtccgcgcccgagctgctgcgtgaagataatgctggattcggtgctgcgcaacatgacgatttggttgacggcgggaatatcgactccctcattgaacatatcgacagtgaagagatagtcgagttcgccttcagtgagcttgcggacgtattcgtctcgctgcgcttgggacacgggcctgccgtcatcgtccgtgctggtaacggcagcggtgcgataggggcgttcatcttgttgattccactgctggttaaacagctgggacagcttatgggcttcctcctgtcggctgcagaacacgagtccggtgaccggaatgttgaactgcccatattcctgcaacttgtcaatgatgtagcggactcgcttttcggtggcaagctgctcgatctcgtacttgagctgtttcgagtccttcgcatcaagacccttggagacatcgagacgatgggcgattccattcggatcgtcgtcggagccaaggtattccgcaacgccgtagtagtggaatggacagagcatgttctcgtccaacgccttttgcaagcgaatttcgtacgcgatgttatgcccgaatagctcgaagatgttgatgccgtcggtgcgctctggcgtggcggtcatgccgagcatgaagtcggcatctttgaaatgattgatgacgcgctgatatccttcggctccagcgtgatgaacttcgtcaaccagaacgtagtcgaattcatcggatttgaattgcgccaaaacctccggctgccgcatcgtctgtaccgtggcgaatacgtagcggcggtcctgttgcttgctggtgcctgaatacaatcccaattcggattcatcacagccgagcaccttttggtaagagttcattgcggtttgaagaatcatctgctgttgggcgatgtacagcatgcgcttcggctggcattcgcgtacgtcgaatgcggaaaggtacgtctttccggtgccggtggccgacacgataattgcgcggtgctcgccttgttcacgaagtttcttgagattcgccaacgcctcctgttgcatggcgtttggctgaatgtcatgcccctcaaacgactgcagaatctcatgacgcggtggggcgtatttcttgaaatcttcctcatactgtttgatccactcttcggtcagcggaacggaatcagccacctgtgagtcgatttcatcctggaactgcccgaccagctctccatccgccagcgatgagactttgagattccattcgcgttgcgtggtcaatgcggctccagtgagattggaactgccaacgtacaggtcgtaatagggcgtaccgtctttcatgcggcgagaaaagatatatccctttggatggaatggctgtccttgagccattgcggccactgaggcattgcgggagccttcccacacgcgaacgtcaacaccagtggtgttctgaagatgcagcagctcccagaatgccctgggatcgttgaaatgatttttcgttgaggtaatcagtgtgcccgctcgggtcgctgtttcatggtgacttctgaagtcttcaaataagctgagcacggcctcagccgagacgaatgcgacagaaatgtcgaaggaatcgctagtagccaaggaattgccgatttcctcgcgcatggtcaatccaccggggcgatttgcgatgagggtcggcttatattcgccgggagcatctgagcgcggctcgatcagacctgagatgacatcttcgaggattgagggtgtcgggccaggatcactatgttgcgtgttggccggagagcttgaggtgctggccagattgatagacatgttgtcttgttcccttgcgattcgaattgtttgttgatgactgcatgactgcatggctgcgctatggcgcattcatcggagcgtcagctgtttgctggcgataatcgcgactgcttcgcgatctaccggagcccagttcaatgtcggcatatcggcaggattcagccatcggatatcagtatgctcggtgagatgcggtgtgccggcgatgaggtgacagacgaatgtagtgagccgtacggtcccaaagtcgtaggcgtattcgctggtgcacacttcttccgcgacttcaacttcgcataacagctcttcttcgatttcgcggtgtaaagcctgccgcgctgtttcatgaggttcgattttgccgccggggaattcccagtatccggccaacgacttccccggaccgcgttgtgcacatagtacggtgccgttggtgacgattgcggctcccacgacgttaatgattttgcgttccggatccatgaacaaccaggatacaacgcttcaagatccacaagcgatccacgatcctcgacagtttcgcaagaacgatcctgattcaatcggaactactggaatcgcagtgttctagggcatttgtggaacgaaaagaaaggctgatcaatggtgaatgaacggcagaccgatacgtgtgcggacgtgatgtacaggcgtgaacggcagagaggctgtggcgaagcagggctggacttcgcccctttcattccctcacaggatgaagttgatcagcagatgagcgcattggatgacaagcttgtgtccaaggctcaggaacaatacgcgaaccgagaaatctatcctttggacgagtgctatcagttggacgggtcgacgtttatctcagccgaggcgtttgaagagattcttggcgacgagcaaacgcattatatggcttggaaaaacggctgtattgataagctgtccattgattattgggagatgccggatgtgatggcctatcttgtggagcgcagcattgcggaaggtgacggcggtgaatgctgttatacggatgctcagccgattgattatgcggaagattgtgcgtactcgcccagcgagatgttggagtgcttaggcgccaattggcaagagcagggtgttgccgatgatggtttgagttacgcgttgtacgggcacccgaatatcaatgtcgagaacgtgtccggttcgatgatggtcgtatcgacggagcagcctgggctttcggtgatggttgattatcgcagcggaatttgggtggtccagccgtttgcccatgacgagtcatttgggtctgcgattcagtttggtgagcggcttgcgcccgttgaggctggccttttgcggcccaatgtctatcagcattttttggaggcgaaacatgtgtttgattacgcaatcgcgtggattgaagatgttggggaaggcgctctcgactattgtggtagccaagagaagcgatccgtttccgaggtgagattcgggagcgatccgactctcggcagtgattcatctacgcagacaagccaaaggagcctcgccatgattctcgtcaccaccaccccgtccgtcgacggatacaccatcaccaactaccagggcatcgtcttcggcgaagtggtatccggtgtgaacatgttcaaggatcttggcgcgggcctgcgcaacatgttcggcggccgcagccagggctatgaggaggagctgatgcgcgcccgcaacgaggccatcgccgagatgcagcagcgcgcggaggcgatgggcgcgcacgccgtggtcggcgtggacatcgactatgaagtgctcggtgccgacaacggtatgctgatggtcaccgcgtccggcaccgccgtgcagatcgcgcgtacggcctgagctcatcgagcacaggccaaacctgggccagaactcgtccatcaagccgcactctgtcggttatcgtgacgcattacactggcgctcatgaccatacgaatcgaagcatacgaccggctgcccgacgcggcccgcgccatacgcgagcaggtgttcatccgcgaacgcgactggcggccggaattcgatgaatgggatgccgtgtccgtgcatctgctggcgttcgattcgaacgatgcgcccaatcgccccggcctgtccgcgcaatcggcctcgtctattcagtccggccagcccgaccagaatcgccccgtggcgacttgccggttctatgcggaccccgaccatcccgaccagcccgggcgatacgtcatcgcgcggctcgcggtgctgaccgaagcgcaaggcaggcacatcggctcgcggctgctgtccgacgccgaacgccgcatcgcgcaagccggcggaaccatggctgccgtgcactcggaaaacgaccactacaagttctacgaacagcgcggctaccggctcactgacgaggtctatgaaggcggtcgtcacggctggctggtcaaggacctatctcgtaacgtatgaaggtccgcctcggtgctgggcgagcgaacctacagcgcgcaggcaatcagataaatcgccacgacgtggcaggcgtatccgataaccgtgcccaagtgaaacacctcgtgaaactcgaaccagccggggacgggattcggcttgcgtagcgcaaagcatacggcgccggcgatgatgaggaagatgttcgaataatcgatgccgcacagcacgacgtgcagccatccgcgcagtcgcggcttgcgattgccgaatgcatcaacggggacgatctggcgcttgatcgccttcaacgcgccttggcttggcgatagcgcgattgcgcggcccctgtactgagctgatgcgcgatccagtgcggtggggctggtgcttgcgctggattttgactcgcggttgtggaagacacaactgttgcggcggaagccatggttcgtccagatggcgtgttgatggaaacgctcataccgatcacctcgctatggccggcgacgctctcccggccactaacttacgctgccgtaacctagtataggcccgcgcaataatcaaggttgatttcgtaatgcttacagttcttccgtggtgtggtattcggtggtacggttgcggaatgcatcgctaagtctgtgaactcgtattatgcgtgtctgctggggtccgacttgtgctggttcctgatttcggattgctgcgaatgatgctcccgacaccgccctgccaattgtcggattcgtacggctcggccattcggtcgagctggtcgtcggtgactccaaatgcttcgttgatttcgtctcggttcatgatgctatgtaatgctagtttatggcggacggaaagttgaggaaagttaaatctacttcatgggcttctctctgatctgtatttgtcccggttcatatgtcaatcgtttgacctgtcgaccggggcagaatccgctgtcccggtcggcgatttcggcttgttttcgtgaaccgggacactccggtttcctcaactcatatcgtctggcagacggaatcggcggaataaggccgattctggaattggcacgttgtcccggttttcgcataaatcgattgacatttataccggggcaacaaaaattgtcccggtttgcaaagatcgcccgaaatcgcgaaccgggacagcggattctggcctggcttgaacgtcaaacgattgatgcaggtaccgggacattttccgccacgaaagttgggccataagtctcaagtcctaagcccccccctcaaggccatcgcaacttgaaaaacggcgcttgcccggacaaagcaaaagggctggaaccttccgattccagccctttagttgctggtgcgagtggggggagttgaacccccacgagcatacactcactgccacctgaagacagcgcgtctaccattccgccacactcgcagacaatcgactaacttacacccggctgggtaatcatgcaatcttcggcgtgtcgcatgggaggcagggatatatcgcttgtgggtctcctgcgggcgccgtgatctttgagggtggcggcactcccctcagtcacttcgtgacagctcgtccgcaattaaggacgggccttgcctgcaacctgctggttcgactatcgtctcaccttcgactacaaacagcccacagggctgtttgcttaacgtctcagcctcagcgaggggagcagagagaagttcggcacaagccgcaacgaaggagaaaaactcacaaccctggccggcgctcgccgttgccgtagaagtgggccagcgcttcgtcgcggaactcatcaaagtatccgccgtcgatcgaggcgcggatgtcgtctagcagcttcacgaagaaatgctcgttgtggatcgtggccaacgtaaacccgttgaactcgcgggcgcgcagcaggtggtcgacgtacgcgcgcgaataatgctggcatgtgtagcagtcgcatccctcctccagcggcccgaaatcgaacttatgctgggcacgcttgatgttgtaccggccggcgcgcgtgtaaatcgcgccgtttcgggcgcagcgtgcgggggccacgcagtcgaaggtgtcgccgccgttctccacgcaagcgaaaatgtcgtccacagaggcgatacccagcacgtggcgtgggcggttttccggcatcgcgtcgcagatccatgcacaggtgtcgccgatgatgcgcttctcgatcgcgccgccgatgcccacgccgtcgaagtccagagaggcgatttgcgaggccgcacgtcggcgcagatcctcgtaattcgcgccctgcaccacgccatacaacgcctgatacggcttcccgactcgatcagccgtcagccgctggtgctcgtccacgcagcgacgggcccagcggaacgtgcgctccaccgaatcctcctggtaggagcgggtgttcatcagcgtggtgagttcatcgaacgcgaacatgatgtccgcgccgattttgtgctggatgcccatcgaaatctcagcggagaaacgatgtgcgtcaccattcaaaggcgacttgaacgtcacgccgtcctcatccacccaggccatgcgctccttgcccttggcgatgatgtcgtccgacttcatgccggtcacgtccattgccagcgtcttcttgaagccgacgcccagcgacatcacttggaaaccgccagaatcggtgaacgtgggcccatcccagttcatgaaacgcgccaagccgccggccgcgtccagcacgtcctcgcccgggcgctcgaacaggtggaaggcgttggccagcaggcactgtgcgcctagatccttcatctgctcgggcagcacggccttcatcgcggcttgcgtgcccaccggcacgaaggcaggcgtgcgaatatcgccgtggggcgtgtgaatgatgccggtgcggccgtatcgggcaccgtctcgcccaagcccgctggccgtggatggcaggcgggtgatcgtttcgaaatggaaggcgctgcggtcgccgggctgtccgggctgtgcgcccaacggatgttcaagaaggctgatcgtcatatgttcactttaggcagaagggccagaaaagggccggaaattgtgaagaactcggtttcgaggggcggatttcgccgctcccgaacgtctacttccgcttcaaggggctcccggtcaagtaggccggctgcaaaaatggcggaatggcgttaaatgagggcccttgatactcggaattgaccgcgcgaacagccccttgaagtgcaagtagatgttcccgaaacaggaaatcagcccctcgaagccgagatgcccataagactctgcgatgattacgcatagactttcaatcaacgttcagaaaacctccagattgactgcctttactactgaggtagcacacgagaagtggcaatgggcaagtgcccgaatagccgccgaacagacgtgataggaatttaggaaaaggagcagcaatggctgacgaatttaacccgcagggcgtcgaccagaccccgcagaataacgaaaaccccaataatactgccgataccggcaacatcgagccgaagaacccatttgtaggcggcgcctcggttgatgccggcaacgccagcgattccagcgagcagcaagccccggttcccccggccgcccccgctgccgatcagcggcctacgcaagccgttaccgacaccgccgccaccgagcccatcccggactacgcctccgccaagggcgagagtacggtggtctcctcctcgccggcttctccggcagcgccggccgcagaccagacctcggccacaactccgctgtaccgcccggccccggaatacggcgcttatggaccgaccccgactcaggcacagggccagcagggcggccaggccggcagcaatgcccagcccacgcagcaattcccgttcggtcagcctgcacagcaaaccccacagggccagcagggcaaccgcaatccctactacaccaataacccgcagccgcagggcaacggcaatccgttcaatccgcccacgcagccgcagcagaacaacggcaacccgtttgccagccagtccggtcagaatggccagaatggccagcagccccagcagggcggtctgttcggtttcggcactcccggtaccggtacgccgaacggtcaaggtccgacccagccgggacagcccggtcagcccggccccgccaagcagggcatgtccaagacggcgagcaacatcctcatcgccgtggtcgccgccgttctggctgcggccctctgcctgggcctcggttacggtgccctcaccagcggcctgatcaccttgccgaccagcaattcgctgtccaacgtcagctcgaataagtccggctccgggtccgccaccgccaagagcggcgaagcccccgactggcagaccgtcgccagcgatgtctccggctccgtggtctccatccagaccgcgttgagcaacggcaccgccaagggctccggcgccatcatcgacaccgaaggccacatcatcaccaacaaccacgtgatctccggcgcccagcagattcaggtgacgcttgccaacggcaacatgtattccgccacgctcgtcggcaccgacaccaccaccgatcttgcggtcatcaagctcgacaacccgccgagcgacctcaaggccgtgaaattcgccgattccgacaagctcgccgtcggcgagaacgtgatggccatcggcaacccgctcggctacgacgacaccgccaccaccggcatcgtctccgccctgaaccgcccggtgaccgtgaccgacgataacaacaacgagatcgtcaccaacgccgtccagatcgacgcggccatcaaccccggcaactccggcggcccgaccttcaacgcggccggccaggtgatcggtatcaactcgtccatcgcctcgaccgccgcctcatccgactccgccggttcgatcggcatcggcttcgccatcccgtccaacctcgtcaagcgtgtggccgacgaaatcatcaaggacggcaaggtcaagcacgttgccctcggcgtggtcatcaagtccgacacggttgaagccgacggcgtgacccgcggcggcgcgaccatcaccaagtccagcgccactggcagcgcggtcgtctccggcggcccggccgacaaggccggcctcaaggagggcgacaccatcgtggccttcaacggcaacgccgtgaacaacaactactcgctgcttggttacgttcgtgccgcggctttgggagacaaggtgacgctgaccatcgtgcgcgacggcaagaccatgaatgtggacgtgacgctcgatcaggaggagtcgtcggtgaacggttcgtccggctccgattccaacggcaacagccagaataaccagaacaaccagaacggcaatggccagaacggttacggtaatggcaatggcaacagcgatggcggcaccggtgacggcggcggcttctccgacccattcggcctgtggtaaagccgactcgacaacgtcacacggtgttgagcggtaaccgctgaacaccgtgtcagacaagcaaaggcccgtggcagtgagcaaactcctgccacgggcctttcgtatgcgctattgtgccctgcgcccatgccgccaacgtagtttcgatatccggcatgtcgcgcaacgctcgttgatagggtaggtcaagcactgagttcgggcggtgctccgaacaaagcgcataattcaatacaaaactgaacatttctttacgccgtgtatcggaaggtcgcgcgggagccgagcaaagcgaagccccaggcaaagccgccggtgggttaacaaggcgtgaccgcagcgccgattgcgcgggccacgcttgccgtaccgcaatcgactccgtatacgagcgtaaggagcaatgatgggcgcactcatcagattcttcaccaaaattctcgacatctgcaagcttgtgccgatgcttccggtcgtcgtcatcgccgcaattccgctggctttactgggcgattggcgtccgtggggcaatgcgatggcgattccggtacttggcaatccgggcttcggccagtggctggttatcgcattggtgctgattatcgtgattgacactgtgcgcggcatgattgacgatttgcgccacgggcaggtcggggttgatgtgctggccgtggtcgcgatcctctccaccgtggccgtcgccgaatactgggcaagttgggcggtgacgctgatgattacgtccggcgaggccattgaggaatacgcccaagccaaggccgagcgcagtctgaccgcgcttatggaagccgcgccgcagaccgcacacgtcgtcaacctgcctggtgtggggtgtgggtttgctaccgataagggcgattcgtccgatggcttccggcgtgtgggcttggcgtcggctgcggccgccgcgcaccgcttcgacacggtgccggtcgagcaggtgcagctgggcgatgtactcatggtgctgccgggcgaaactgtgccggttgacggtgagctgctgtccggcacggccacgctcgacctgagcaatatcaacggtgagccggtgccgcgtgaagtgttcgccggcgcccgcgtgatgtccggcgcggtgaacggctcgactgcattgaccatgcgtgccacccaggtggccgccgattcccagtaccagcgcatcctcgaactcgtcgcttccgcacaggagtcccgtccggccgtggtgaaaaccgccgaccgattggccgttccgttcactgtgctgtcgctggtaatagcgggcgtcgcctgggcggtgtccggcataccgacgcggttcgtccaggtgttagtgctggctacgccctgtccactgcttatcgccgcgcccgtggcatacatcgccggtactggccgtctcgccgccgccggtgtgctcatcaaggcgcaggatgtgctcgaaaaccttggccgcgtcacccaggtattcttcgataaaaccggcacgcttaccgtcaagcagccgcaagtggtgcgcgttgagatgctgcctggagctgagacccgtcttaatgaggaccatgtgctgatgatggccggcgttgtagagagctattccgtacacatcctgtcgaagggcatcgccaaagccggtgccgacgcgatggcccgcttgcgtcagcgtttcgcggacggccagcgtctctgccccgaaccagaggccagctggcccggccacggccgcgaatatccggtcgtcaagaatattaatgaggactccggcaagggcgtgtccggcgaggtgaacggccatgccgtccgcgtcgggcgactgtcgttcgctgcagccggggaggacgggttcttgactgccgaggtagcgggtgtaagccgggcggatggcccacggcaggaggaggccgacctcctcagcccgcttcacggacagtcccctctgggcggggatactgaggcaggatctggccgtacgattgccgggaacactaaggaaaaggaaacgctgcgtacgcgattcggtatgctacagccggacgaaatggcctcctacgtgtccgttgacgggcaactgatcgcccgcatcgtgctgcgagatgtacctcgcgccaacaccaaaaccgcgctcgccaatctgcacgaactgggtgttaccaagctcgccatgcttaccggcgataagcacgcctcggccgaaatcatcgcggacgaagtcggcatcgacgaggtccacgccgagctgttccccgaagacaaggttgccgccgtcaaggctgccacggaggcaagcgccgcgccggccgggcgcgcgaatcacgccgccagccctgtgtccgatgccgtagatggcatccggtccgatggttctcaaccgtcgcgttctcgatgcagccgcgccgccgcaatccgcaagccggtcacgatgatggtcggcgacggcgtgaacgatgccccggtacttgccgtcgccgatatcggcgtggccatgaccgacggcacttccactgctgcttccgaaagcgcccaagtggtcattatgaatgacgatattgccgctgtgccgcgcgctatcgccattgcacgccgtaccaagcgcgtgatgctgcaggccgtgatcgctggtctcgtactcgccaccatcggcatgattgccgccgccttcaacctcattccagtgatcgtcggcgctttcctccaagaggccatcgacgtggtcagcatcctctgggccctcactgccctcatcgaccgcgactaggcggggtatctcctcgactgagtcgcggttttgccccgctgacggtctgtaagcggggcgattctgtgggctaataggggttttgctccactcgtggtctgcgagtggggtgattttacggtctaatagtggttttgctgcgctggtgggtgttcagcggggtgccttggcgggttagtcgcagtttcgctccgctggtgggctgtaagcggagcaatttttcgggttactcgcgattttgctccgctggcggtctgtgagtggggcaatttcttgatcgactcgtggttttgccccgctggcgtgaggctggcagagggtattaggcacaggattcccaccactcgccctctgttgcaacggaaggctttgcgttaggctagagcgcgtgactgaatctgtgaatactgaactccgcattgctgtaatcggcgctggcccggccggtgtctactcatccgatatcttcctgcgccagctcaagaagctgggcgaagagcttggcctcggcaccgaagcgcgcatcgacctgttcgagaagctgccggtgccgttcggcctggtgcgttacggtgtggccccggaccacccgtccatcaagttcatcgcctccgcgcttgagaagacgctcgacaacccgaacatccacctctactgcgacgtggaattcggcaaggacgtgactcttgacgacctgttggcccgttacgacgccgtgctgttcgccaccggcgcggtcaaggacaagccgctgaacctgcccggtgccgaccttgaaggcgtgtacggcgccgccaagttcgtcgaatggtacgacggttaccccaccggtgcccgcgaatggccgcttacggccgagaacgtcgccgtgatcggcggcggcaacgtggccatggacgtggcccgcgaactcatgcgcaacgccgacgacctcaaggtcaagaccgacattccggacaacgtgtacgagggcatcggccagaacaaggccaaggtgctccacctgttcatccgccgtggcgtggcccaggccaagttcagcgtgcaggaactgcgcgagatggagaagctgcccggcgtgcagctcatcatcaacgaggacgacttcgatctggacgacgagaccatcgaggtggccggcaaggacaagctcacccgccagatggtcgaggagctgttcgccatccgcgagatggccgaagacatggaagacgacggcgacgtcgacttcgaaggcaacccggccgaccgaaagtactacgtgcacttcaactccgcccccaccgagattctcggcgaggacggcaaggtcaaggccgtccgcgtggagcgcaccgaaaccggtgccgacggcaagatgcaccgcaccggcgagttcaccgactacccggttgaggccgtctaccacgccatcggttacaagcccgccgaagcccccggcattgcctacgacgagcacggcgcccacctggccaacgccaacggcgacggccgcatcaccaccgaggccgacggcggcgaagtgcgcgaccgcctgtacgccaccggttgggccaagcgcggcccggtgggcctgatcggctccaccaagtccgatgcgctcgccatcgtgaccaacatgctcgaggatctggccaaggccgctgaaggtggccgtgtggcagccgaccgcgaccccgaatccatcgaccgactgctggccgagcgcggcattcgcccgatcgacttcgccggctggaagaaggtcgacgccttcgagcgcgccgagggtgccaaggaaggccgcgagcacaagaaggtcatcgagcccgaccagatgcgcgagctcgcccacgcctgacggcccgcccacgcccgtccggcatttgtccggcattcgtccggcattcgtccacccggccgcgccccgtgcggacgcggccgggctcggggccggacgggccgggcgaatatgggacatttctcgcggcgtatatccagcaatcattcagcctgcgattttagtgtgtgcattatggatgccaaagtacgggtgcacggccatttcaacggcctgaagacaacgctgctgtttgccctgatgtgggccatcatcatgctgatttggtgggccacgggcggcagtcggcaaaccctgagcatctatattgtcatcggcctgattaccacgttcggcacctactggttctccgacaaactcgccatcgcctccatgggcgcgcgggaagtcagcgagcaggaagccccggagatctaccagattgtgcgtgaactgagcgccaaggccggcaagccgatgcctcgcatctacatcgcccccaccatgagcccgaacgccttcgccaccgggcgcaacgaacggcacgcggccgtctgctgtacccaaggcatcctgcagattctcaacgcccgtgaactgcgtggtgtgctgggccacgaacttatgcacgtgtacaaccacgacatcctggcttccgccatcgcctctgccatggccaccgtcatctcctacctaggctattcgctgatgtatttcggcggcggttcgcgagacgaccgcgacagttccggtggcctcggcctgatcggcgcattgctgagcgtgattctcgcgccgatcgccgcgtctttgatccagatggccatctcccgcacccgcgagtacgacgccgatgaagacggcagcttgctcaccggcgatcccgaggccctggcttccgcgctgaacaagatttcctacggcgcacagaccgcgccgatgcgcaaaaccgccggcacccagtccgtctccgcaatgatgatcgccaacccgttctccgcggtcggtttctcgcgcttgttctccacgcacccgccgaccgatgagcgcatagcgcgtctcatgcagatggccaacgaaatgaacggcacgccgatcgctccgcccacctactccacgcgcgtcggcaggtgacgtgctaggataactattcgtgcctcgtttggctgagcatgctcgtcacgtgaggtgcagcagccgtaaggcatgcggacatagttcatcggtagaatgaaagcttcccaagctttagaggcgggttcgactcccgttgtccgctccattgattttcaatgattttcattatttccgggaaagtgtcgcgcacgatcgcaaaactacgcgctatttgagcgctttgcccgcggaacccagctgccggcaagcctcgaccacgcgggcggacatggaatcctcagccttacggccccaagaacgcggatcgtagaacttcttctcgcccacttcgccgtcgatcttcagcaccttgtcgtagttctcgaacacgtggtcggcgattggacgggtgaaggcgtactgggtatcggtgtcgatgttcatcttgatcacgccgtagcttacagcttcggcgatttcttccgggcgtgaaccggagccgccgtggaacaccagctcaaacggcttgccgttggggaaatcgactatgccggccgcgctaggcaactcgccttcggccaccgcgcgcgccacacgcgcctgaatgtcgccgagtagcgacggacgcagcttgaccacgccgggcttgtaggcaccatgcacattgccgaatgtgaaagcggccatgtaccggccacgttcgcccaaacccagtcggcgggcgacttcgaggccatcttccggagtggaatacagcttttcattgatttcggcggagtgaccgtcttcctcaccgccgaccgcgccgatttcgatttcgagcacggtgtgcgccttctgcgacttgtcgagcagttcctcggcgatgtccagattttccttgagcggcacggtggagccatcccacatatgcgactggaatgtaggctcctggcctcgtgccacctgatcggcctcatgcgcgagcagaggacgcgcccactcatccagatactgcttggcgcagtgatcggtgtgcagagcgatggtgatgttcgggtatttcgcagccacttcatgtgcgaaagccgccagcgccagcgagccggtaacgcgatcattgacccccctgccggagacgtaggccgcgcctcccacggaaatctggatgatgccgtcggactcggcgtctgcgaagcccttcaatgcggcattcagcgtctgtgagctggttacgttgatggctggataggcgtaaccgcctcggcgggcggcatcgagcatttcggcatagcgttccggtgttgcgatcgtcatggcttcattatcgcgcgaggcatgcccgctaggccccgttcttcaacctgtgcgcttgtgcgattggtcacagcgccgcctcgtacgagtagaaattcgtcacccatttcgggttgtcgcacctccagcctcgccctgcgtgagacgaaacttcgcagggtagagggtgtacggtagtctgtttccggcggaatcgtgcgaatgcggaggtgcatcatgcctggaattgttcttattggtgctcagtggggcgacgagggtaaaggcaaggctaccgatttgatcggcaccaaggtcgattacgtcgcgcgcttcaacggcggcaacaacgcgggccatagcgtggtggtcggcgatgagtcgtacgccctgcacctgctgccttccggtattatcaacccgaacctgaccccggtgatcggcaacggcgtggtcgtggacccggaagtgctcttcgaggagattgacggcctggaatcccgcggcatcgattgctcccacctcaaggtgagcgaggccgcacatatcatcgcgccctaccaccgcacactcgacaaggtgaccgaacgcttccttggcaagcacaagatcggcaccaccggccgtggcatcggcccggcctacgcggacaagatcaaccgtgtcggcatccgcgtgcatgacctgttcaacgccgaccatctgcacgacaaggtggaggccagcctgcaccagaagaaccagatgctggtcaagctctacaaccgtcgtccgatcgacgtggaccagaccaccgaggagctgctgaagctcggcgaacgcctcaagccgtacgtggccaacaccggcctgattctcaacaaggcgcttgacgaaggcaagaccgtactgttcgaaggcgctcaggccaccatgcttgacgtggaccatggcacctacccgttcgtcacttcttccaacccgaccgccggcggcgcctgcaccggcaccggcgtgggccccaccaagatcacccgcgtaatcggcgtctccaaggcctacgtcacccgcgtgggcgaaggcccattccccaccgaactgctggacgagtccggcgaatggctgcgtcagcagggccacgaattcggcgtgaccaccggccgcccgcgtcgctgtggttggttcgatgcagtcgtcaaccggtacgcctcccaggtcaacggcctgaccgacatcgtgctcaccaagcttgacgtgctcaccggtctgaaggagattccgatctgcgtggcttacgacgtggacggcgaacgtcacgacgatatgccgaccgatcaggccgctttcgccgccgccaagccgatttacgagaccatgcccggctgggatgaagacatctccaactgccactccttcgacgagctgcctgccacctgccaggcctacgtcaagcgtttggaagagctgagcggctgccgtatctccgcgatcggcaccggtccgcagcgcgatcatgtcatccagatcaattcgctggtcgactgaccgtctgcaacgaatttcccggcttgactggtaacgacgcggcacatgatatccgccggctgattccgcgattcgaccacttgaagtggaagatggcggcggccggcatagtcattggtctggtttcaggattgctggttgtcgtataccgtctcggcatcgaatacggcacggatgcgtcccgttggatatatgcgcggattcgcgagaccccgtggctgattgcgccgtgggcggttgccgcggtggcggccgcgctagcaatcgcgtggatggtcggcaaggagccgatggctggtggcagcggcatcccgcagaccaacggcgtggtgatatgcggcttgaagatgcgttggcagacgattctgccagtccgtttcgtcggtggactgttgggcgcgttgtttggtctgtcgctcggccgtgaggggccgtccattcagattggtgcgtcgggcgcgcagtgtgtgtcccaccgtttgcgcggccgccgccgtgaggacatgcaggagcattatctggtcaccgccggtgccgcggccggcttgtccgccgcgttcagcgcgccgctgtccggcatgatgttcgctttggaaggggtgcatcggagtttttcccctgcgattctgatgggcgccaccgccgcatcgctgaccgccgatttcgtctcaaaatactgtttcggtctgcgtccggttttggatttcggtgatatcggtcagctgtcgttggaagagtatgtgtggctgattccgttgggattggtggccggtttggttggttcgctgatgaaccgctcgttgcttggcttccagacgctgtacggcaaactgccggcatggagccgcccgatgattgcgattgcgatcgcgttgcctgtcggcatctggttgcccgatgtgctcggcggcggctcgaatctgattgataccgccgaacatgcgcgcgtcggcttgggaatgctgtgtctgctgttcgtggcgaagatgctgttcacatccacgagtttcggctcaggcgcgcctggcggtattttcatgccgattcttgcggtcggttcgttggccggcggcatctgcggtgaagtgttgcatcgattcggtgatctgccatccgacgcagtggcggtgtttgcggtgtgcgtgatgacgggcacgctcgccgcgtccgtgaaaacgccgatcacgtcgattctgttggctgtggagatgtctggaacgttgacgcacatgctgccggtcgcggccgtcgctttcgtcgcgctgttggtgtccgatttgctgcgcaccaaaccgatttatggggagttgctggagcggtacgtgcgcgcgcaaggcatgcagatggcgatcgcaagccatgtgggcagcggcattatggaactgccattggaaatgggagcgattgcggacggcaagcgggtgtgtgacgtgcgttggccgtctgggtgcctgatcatcggcctgcgtcgcggcgaaagcgagatcgtgccgcgcggcgatacacggctgcgtgccggcgactatctggtggtgctgttcagtggcgaggaggagcgcgaggtgcgacctgcgatgcggcggctgtgtgatgcccggcttgactgagcctggctgaattcggctggactctggatgtacgaatctgcggaatcggacatccagggtgcatacgttggcgctccgtgtaaactcatatgcgttaggaaggcggcaaccgcggcccagctcgttgttgcacggcctatgggcggaacaacgctgtccgcggaaggccagtacagggggagcgcaatggaatcgcaagaacaatcgccgggagacgtggtgactgcgggtgaggactcacatcccatcacgcaggcaatcgacactgttgaggtgatgcatgctggtgcaaccgcgcccgccgctaacaccatggatccgcctacgattcccctggcgccgatgaaacgtatgcaggcgcggttcaatccgctcgccgacggactgatgtatgttgtggtgttcgtcggtggatttgttggagtcggctgtcggcatgcgttggatatgctcctgccgtcggtcagcgggacgccattcgttgtgggcacgtttgtgtcgaatatggtcgcctgcttcctgttcgcgatgctgaccgaattcatggcgaccgcttcgtggctgcgtcgccgggtgcggcaggttgtcagccgtggcgttgggctcggcttgctcggcgggctttcgacgatgtccggcgtgatgctggaaacgatggaaggtctgcacgagcggcatatcgccagtgcgcttggctatcttgcgggaaattttgcaggcggtttgctcactgccgccgccggcgtggttctgatgcaggcactgctgtcacggagtactcgaaagcgggttcggggtgcgttttcagctgtttccgtgtccgattccgccgaatcggacacgcagggcgtacgccatgtgaaagtggccgacgtggcgcgttctgccgcgcaggccgcaatggaagccgcgcagacggcccagcagattgcacagacgggacaggttccgcgagtcgaaacaccaaccgtgccgccgaccgccagccagcctatgcagacaggccgcgttccgcagattcctccgctggtcgttcctcagctgacacagtcatcgcagccgttgttgcgcgagccggatacttcagacttggggcagctgcccgagccgattcagcagtcgcaaccaatccagcagccccagcagcagtcgcagccaatccagcagccggccaacccgcttccacccagcttcgagcccaaaccgatcactgcggagatttcgcttgtcgccgacccgactaccggggaggtgcgctgatgatgtggatgatctgtctgttcggcggtctgggagccatggcccgttacgtgctcgacgtgtcaattcaacaaggctggaaccgcgagaatcgaagaacgaaccgcaacttcccgctatccacgctcgtcatcaacggcgtcgcctcgctatgcgcgggcatcgccatgatgtcctactattcgcaatcggtggatatggacacggtcatgatgttcgttgtcggatttctcggtggtttctcaacattctccacggcgctcaacgaagtggtttcattgattcgccagcgtcgttttacgctggctctgggctatggaatagcaaccgtcgcggtgcctctcatttgtgtggccgccggtttcggcattgcgctgcttgccaatccggcgtaattttcacgttacacggacggtcgctgagtaacgtgaaagaaatctgagcgcaaccgccatcaaggccgccagtccggatgcaacgctggtgattgcattcgaccagaccaagccgctgctgaaggccttcgcctccgcgggagtcgacactaagaagctgtatttcgttgccggactgtcgaacaggttcgagagaatgtaaatgaatgtaatatttcgtggtaagcacgtgagcatacaacgatagaacagtgatgacggggaaggtgcgatcatggtcggcatgcgcgatgtggcgaagaaggccggggtgtctctgagcaccgtctcgctggtggtgaacggcaacgggtacgtgtctgatgacatgcgcgaacgtgtgcgcaaagccatgcaagccctcaattatgtgccgaacgagcttgcccgcaatctgtatcatgatcgcacgaatctggtcggcgtcatcgtgcccaccatccgccacccgttctttgcgacgtttaccgcacatctgcagcatgcgctcgccgcgcaaggattacgcactatgctgtgctctaccgcagatgaggcggacggcgaaatccagtatgtcgacatgttgcgtcggcacatgatggacggcatcgtcatgtgtgcgcacacttcgcatcccggcgattattggacgtcgattcatcgcccgatcgtcgcgttcgaccgtgtgcttggagacggtatttcgtcaatcggatccgaccacgagcagggtgggcgattgattgcgcagatgctgatccgcaatggtgccaaacatgtggtgatgattggcggtccgcgagatcaattcttcgatttggctgcgcgcggagaagtcgaggaaggaccgttcgatttgggaaagaccacgttcccgacggtgcgctactacctcacgttggaacaggaattgacctccgcaggcgtgaaatacgagtatgttgaagctggcgaagtgatggattttgccggctatcatcgtgcggtcagcaatgcgctcgacaaggtgacgaccgacggcgtcgatgccgtggtcagttccgatattggtgcatcgttctgcgtgcgcgaagcgttgggccgtggaatttccattcctgacgagctgcagatcgttgcctacgatggtacgtatttgactgatttggccggcatgaagctgaccgcggtcgcgcaggatttctcggcgatcgcacagtcggcggccgaccatatcgtgcaggcgattgccaatgaggaagtggccgcggctaacgcttcacgcaagaacatccccaagccgttcgagccgaacgtgcttattcccatgacactggtgccaggcgataccacgcgttgatactgtgcgtcttcatgcgtgtgcccggtgtggatcgcatcgatttcagcggcgtccacaaccggcgaacgcccgtcgatagtcgtgctcatcatccgacttgtgcacatgtgtccgattctgccgaatcggacgtctgagttccgaaaaatgtgttctgtgtgtccgattctggagaatcggtcatgtgtgatgtgaattgggatgtttggatgtccgtttctgcagaatcatctttgctctgtactcgttgattcgcaaatacggcgcatggctcgtcataccggccatgctcggcggcgcggccttcctggcggactcggtgctgacgccggccgtgtcgatctcgtccgccgtcgaaggcctgaagacgctgccggcgttggagcatctgttcaccgagaacaaggatctgacgatgatgatcaccgcggtgatcatcgtgatcctgttcgccgtgcagtcgcgcggcaccgaatcgatcggcaaggtcttcggctcggtggtgatggtctggttcgcgttcctggcgatcgtcggcgtggtagccatcggcaacgactggtccgtgctcgccgcactcaacccgtactacggcatcaagttcctgttcagtccgaataacgccaccggtctggcgctgatgggcaccgtgttcctttcgaccaccggcgccgaggcgctgtactcggatatgggccacgtgggccgcggcaacatctacttcacctggccgttcatcaaggtggcgctggtgctcaactacttcggccagggcgcgtggatgctgcgcaaccagaacaaccccgaactggccgacgccgaggggatcaacccgttcttccagatgatggatccgaacgtgcgctatgtggccgtcgtgctgtcggtcaccgccggcatcatcgcctcccaggcgctgattacgggcgcgttcaccatggtctccgaggccaccggcctcaactggatgccgcatctgcaggtccgttaccctgcccgtacccgcggccagctgtacattccggtcgtcaacgtggtgctgtgcgtggccacgctggccgtgctgctgctgttccgcgattcggaacatatctcggcggcctacggcttggcactgaccatcacgatgatcaccaccacgatcctgctgggcatctacctgtggcaccgcagcaacaagttcggcaccgttgtgttcaccatcgtgttcctggcgatccaggtcctgttcttcgccgcctcgatggccaagttcctgcacggcggctggttcacgctgctgctcacgctggcgatcctcatgatcatgtacacgtggaacgagggcaccaagctggagcgctcgcagcgtcggcacatgatgccgaaggacttcctccccgcgctggacaagctgcacggcgatagccgcatccaccggttcgcggacaacatcgtctacctgaccagcgatccggacctgaagcgtctcgatacggacatcttcttctcgatcttcgccgaccaccccaagcgcgcccgcgcatggtgggcggtggccgtcgagaccaccgacgagccgttcacccgtgagtattcggtcgagagcttcggtaccgactacctgttccgtgtgcgcatccgcctcggcttcaaggtctcgcagtccatcccggcctacctgcatcagatcatgcacgatctggagaagaccggcgagctgccgaaccagcagtcgatctacccgaagcttgacgccgatcccggcatcggcaccatccgctacgtggtgatccacaaggcgctgatgcccgagtcgaaggtctccggccgtggcgccctctcgctgcagatcaagtacgcgatccgccgcgtggccggttccccggtcaagtggttcggcctggcgccgtacaacccgctggtcgaggtgcagccactgttcgtgtccacgcgccgcccgccgcgcctgacccgcgtggccagccaggcgcccaagcgcgagggctgagccggcaggccgaacagccggtgcgagccgggtggcctaatggcatgtcagggggccgcgaaccgtcatcgtacggttcgcggcctttgcatatgcgaatgatgcagagtgggcggtactgcttgtgaatgtagcgggtggacgggtgacgtggttgatgccttttgccgtatgttcacggtggctatgcgtcggatgggactgtaattcgacttcttgggatcttttttgctgcagtggtgcgccaaaaggtctcagccgtctctgcgccacgccttccggcagtcagtacaaggttgtactacactggtggctgtcacacggatgtccccggtcgcccgcgcctccgcggtacatcgttgtatggatacgtgtcacgtatgcagagtgcatgcagatatgtagaaaggaatcccatgccccagcaggaccatctgaccgcacgtctcgtcgtcgatgacgattttgaggtcgctccggtcaacaatcgtctgttcggttcgttcgtcgagcaccttggccgttgcgtgtacaccggcatctacgagcccgaccacccgaccgccgacgagcacggcttccgcaaggacgtcatcgacctggtcaaggaactcggcgccaccaccatccgctacccgggcggcaacttcgtgtccggctaccgctgggaggacggcatcggccccaagcaggaacgtccccgtcgactcgatctggcctggcattccaccgaaaccaacgaattcggcctgcacgagatggccgaatggcttgaggccaccggcggcaacgagctgatggaggccgtcaacctgggcacgcgcggcctgcaggaggccctggacctgctggagtacgcgaacgtgcccggcggcaccgagctgtcggaacgtcgccgcgccaacggcgccgacaagccgttcgatatccgcatgtggtgcctgggcaacgagatggacggcccgtggcagctcggccacaagtccgccgaggactacggcatgctcgccgcctccgtggccgccggcatgcgccagatcgatccggacgtggaactggtggtgtgcggctcctccgcccatggcatgccgaccttcggcaagtgggagcagaccgttcttgagaagacctacgagaacgtgaacttcgtctcctgccacgcctactaccagccgttcttcaaggaggacggcacgcgcgacatggccagcttcctggcctccggcgtggatatggacggcttcatcaaggacgtggccgccaccatcgacgccaccaaggcccatctgaagagcgcgcacgacgtgtacatctcgttcgatgaatggaatgtctggtaccagggtgaggagccgagcaagacccccgagggcatcggcaactggccggtggccccgcgtctgctggaggacatctacaccgccgccgacgccgtggtgttcggcgatctgatgatcacgctgctcaagaacgccgaccgcgtgcgcgccgccagcctggcgcagctggtcaatgtcatcgccccgatcatgacggagccgggcggcccggcctggcgccagaccacgttccacccgttctccgtgaccgcgcgcctggccaagggcggcaccgtgctggagccgaagctgtccgccggcaccgtggatacgccgcgctatggcgaggtcgacggcgtgaacgccgtggccgtgcgctgcgccgacggctcgctcgccgtgtttgcggtgaaccgttcgctcgaggcgaccgccgagttcgagatcaggctgcaggacggcgcgcagccggcatccgtcgaggcgcagacgctgcacgacgacgatctgttcgccgcgaatacgctctacgaccagaaccgtgtgaccccgcacgccaacgggtcggccatgtacgatgccgagtccggcgtggtccgcgtctccctgccgccggtgagttggaccgccctgcacatcaagtgacgcgatgggccgcgcggtccgttccggagaaggacggatcgcacggcccttgcttcccgggccgggcggaagggaccggaccggccggggaaaacgcgttatgctggaatcagacgggcgttccgcctgaaccgtgcggaacatgcccgatggtgcgacgagaggggtgctgtggcgaaacgggtgaccatcaccgacgtggcgcgcgagacgggcgtctccatcaaaacggtgtcgaatgtgctgaacaacaccggcagtatgcgcccggagacgcgccagcgtgtccaggatgccatcgaacgcctcggataccgcgttaacgtgtccgcccgcgccatgaaaaccggcggcacgaagctcatcggactggccatcaccgatttctgccagccgttcatgccctatctcgccgacagcatcgtggcggcggcacgttcccgcgggtacgcggtgatcaccgatacctacaacagcgccggcggcttggcgcaggcgatcccggagacgaagaagctggccgcggacggctggattttcttcatgggctcgccgatcacggatcgcacgatactgcaccagccgtatccgttggtgattgtgggcgattacgatacgcagggactggccgattgggtcacgatgccgaacgtggaggccgtacgcaccgcggtgggggcgctgctggattcgggatgccgtaggatcgcgttgatcggcggcaccgcggagaacgcatgcccggatgccgaccgcgagtcgcggcccgaaaccaccagcacgatgcgtacccgcggctatgtgttggcccatgaggagcgtggcctgcaggtcgattggcggctggtccgtaacgcggattgggtgcagtccggcggccgcgatgcggtggcggggctgttggacgatccggatgcgccgcgtccggatgcggtcatgtgcctgaacgacgcgctcgccatcggggtgattcatgagctgcagcggcgcggcgtgcgcgtgccgcaggatatgcaggtcattgggttcgacaacgtgccggatgccgagtactgcatgcccggattgacgacgatcgacccgcatgtggatgattacgcgcgacatgccgtggatatgctgatcgcgcgcatcgaggggtcggcggatccgttccgcacgtatgtgacctcctacgatctggtgcgtcgtgcctcgacgtgttgacggcccggcgttcgcctggacatgggtctgtgacgggctgctgtcgcctctcccgtggcgtattccgggagaggcgacatgcgggctaggatcggagcagcacctccgtcagcgcttgacggacggcgctcggcatatgcgaatcggagcaatcttccatgtccggcccgctgacgtgctcgagtgaatccatcgtggccaatgcgtcgatgccgttctccgctatggcggcataagcctgttccttggtcagatatcgcatttcggcatgccgaaggatgtcgaagacgtcttccatgcggggatcggcggccatcgtcgtgtcgccgatggtgacacgtatctcgctgcgggtggatacgtcggcgaccgttacctgcaatgtgagggtttcggcatcataccggcgatccgaatcgacggatgcgccgtcggcctgtacggatatgtcgctgtcggtaatgcctcggaacaggaaatcccatgttctccgggccggcagagcgtgaacgtctccctgggctggcgataccgtgagtgcggatgtggcgccgtccttgcgccatcgataggtgatcgcggtggtcgccggggtgatctgccgagagtaatgtcccgaatcctccatcagcgtgaagtcgccgtccgctccggggaagacgatgatctccagatgctgcgggttgtcgacggagttgatggaatccccctcggacaggggctgcatcggcacgatgccgccggccttcgcgaacacgggaattccgtcgagcggacgccagacggtcatgcgccgtccgttgggcgaagacgcgctataccggcgcccggtgaagaagtcgaaccagtcgccctgcggcagccatacgtcggccttgccccgtcgggaggatttatccatcggttccgtgatgggcgcggccagcagttcggtgccgaacatgtattcgttgggaacgtggtatgcggcgtcgatgtcgggcgatccccaatacatgggctccaccaggggaaggcctgtccgggatgcgcgccagttcatggtgtggaggtacggaatcatgcgatggcgcaggcggggcgcatcgtccatgatcgcacggagggggtgcggatgtttttttggacggtcaggcggccagtccaagacttctgcggtattgcacggggctcatccagtccagtgacttcttgatcctggtttcattgtagtgggtcaggtaggcggccaggcgttcgcggaactcctcgtagcccacgcccctccagtcccgcccgtagaataactcgttcttgagcctgccgaagaactcctcggcggccgcgttgtccgggctgcatcccttggcgctcatcgaccggatcagcccgtgctcctcgcagatgcggatccattcgtcccaccggtagtggcagccgcggtcggaatggatgattggatgttccccgtccctgagcgtggcgaccgcgtcaaggagcatccggttcgccatgtcggcgttcggggagcgcgacaaggtccaggagaccaccatcccgtcgaagcagtcgaccaccggggaaagccagcacttgtacccgtccatggtgaactgggtgacgtccgtgacccacagcatgttcggcgcgtcggcgtggaagtcccgctccacgaggttcgccggggcctcgccgatctcgccggcgtaggagctccaccgcttcggccgcttcaggtacacgggccgcatggccccctcgcgcatgatccgcctgacgaccttctccgagacgacgatcgggtcggactcgtcaaggcgcagcatgcggtggatggtccggtatccccatgcgcgcccaccctgctcgaacaggccggcgacgcgggcccgcagcacggcgtacctgtcgcccgcggcgatcgcgccgcgctcgtaatagtaggtgctgcgtttcagccccacggccttcagacaggccgccaggccgaattcacccctgatcgcgtcgacgacccgcgtcctctccctgttcgtcagcatggacgggtcgaggagcgggtcgtcggcttttaaaacatcgatcgtctcccgcatcaccgcgttctccagccgcaggacctccacctgccggcgcagctcctccacgtcatcgccggccgcgggcatcggttcggccggcatcggcgcgtttctcctgtccatcagtcccagtatcccctcgctccggtagcggcgcatccactggtacacgctcgtcggcgtgcaacccgcgtcgcgcgccacgcgggcgaggggctcgccctcgagcgcgcgtctggccgcattcgtcttgcattccagcgtatacgaacgcctgcacgcgcccgtgatctcgtcggcctccgcgtccagcatcgcgttcaacagctgttcgaccttctccgacaccaaccggtccagcttcgtctcgagcatgttctcgtcgacctgtagaatctgattcggcatggttccgtcgccttcctaaataggttgatttggtttggcgactgaaatcgtacccggacgacggaccatgtctctcaactcaagcctcaaccaaaatgcgcaacaaaccgggcgttatcaatcggacacattggagtcggacaggctaagctgcatagaacaccgcatctaatcggttcgacacgcgcatttcactgcgcgactggacattgacgtccctttcgaggtaatatcgaaccggttcgatacatacgtgagtatgcaaatacgtaaacaacaaacaggcagatgcgcacgcaaattgcacccgcgcccatgagccaagggaggtcccatgaaaaacaaagtgcaactcatcacatacgccgatcgtctcggcgatggcactcttagctcgatgaccgacatcctgcgcacccgcttcgacggcgtgtatgacggcgtgcatatcctgccgttcttcactccgttcgatggtgcggatgcaggcttcgacccgatcgaccataccaaagtcgacgaacgtctcggcagctgggacgacgtcgccgaactctccaagacccacaacatcatggtcgacgccatcgtcaaccacatgagttgggaatccaagcagttccaagatgtgcttgaaaaaggtgaggaatccgagtattacccgatgtttctgaccatgagctccgtgttcccgaacggcgccaccgaagaggacctggccggcatctaccgtccgcgtccgggcctgccgttcacccactacaagttcgccggcaagacgcgcttggtctgggtgagcttcaccccgcagcaggtggacatcgacactgattccgccaagggttgggaatacctgatgtcgatcttcgatcagatggccgccagccacgtgcgctacatccgtctcgacgccgtgggctacggcgccaaggaagccggcaccagctgcttcatgacccccaagacctttaagctcatctcccgtctgcgcgaggagggcgtcaagcgcggccttgaaatcctcatcgaggttcacagctactacaagaagcaggtggaaatcgcctccaaggtggaccgcgtctacgatttcgccctgccgccgctgcttctgcactcgctgttcaccggtcacgtcgaacccgtggcccactggaccgagatccgcccgaacaacgccgtcaccgtgctcgatacgcacgatggcatcggcgtgatcgacatcggctccgaccagctcgaccgctccctcaagggcctcgtgcccgacgaggacgtcgacaacctggtcaacaccatccatgccaacacccacggcgaatcccaggccgccaccggtgccgccgcgtccaacctcgacctctaccaggtcaactccacgtactactcggccctcggctgcaacgaccagcactacttggccgcccgcgccgtgcagttcttcctgccgggcgtgccgcaggtctactacgtgggcgcgctcgccggccgcaacgacatggaactgctgcgccgcaccaacaacggccgcgacatcaaccgccactactactccaccgccgaaatcgatgaaaacctcgaacgcccggtggtcaaggccctgaacgccctggccaagttccgcaacgagctgtctgcattcgatggcgagttcagctacgaggtcgatggcgacacgtccatcaccttccgctggaccgccgccgacggcacgtccacggccgccctcaccttcgagcccggacgcggcctcggcacagacaacgccaccccggtcgccagccttgcctggagcgatgccgccggcgaccacgaaacccacgatctgctcgccaacccgccgattgccgatatcgactaaccgttggcccataaacgtcactccgctgtgcgcgctccaagtagtgcgcccggcgtaagctgggttcatggagagcaaaccgcccgcagtgcactgaagccagtgcgcccgggcggttttgcgtatgcggggttgaaggtcatgctcctgcgggcgcggcccaagcatcccgccggaatcgacgagacgagcagcagaacagagaaagagcagcatcatgttggaaccgtatgtgcgtccgggtattgatgatcgcccggatttggacaaggtcctaagtcccgaagacaaagccgccgtggccagactggccatcaagaatcgccgccgcccgcccgaagcctctgcggaccagcctgaggcccaggctgtgcgattggcttccgccggttcttcggcagccgctgctgcagccgccagtgtggacactcccgcgccggatatgtcgtccgcctacctcgacatgcgcgatcccatggtcgccgtcaatggccaacgccctaccgcaggtcaggtctcccgactcaactggggtttcttcgctgcttcaattctggtcggcgcaccttgggtggcgttgaacaccattgccatgcccaacgcgattgcgcgtacgttcggctatgacactgctgttgccggtcatatcgccatcaatccggccactggccgcccgttgcccgtcgccaccgaattggcgatgcccctggccgtgttggtgattgtcggcgtagtggcctccatgtttgcgatgccgctgatttcagtgttgtccgaccgcacacgcatgccattgggccgtcgtaccccgtggatggttggcggaggtctgctgtgcgcgctgatcacgctgattctggggcagaatatcggcatcattgtgctttgtattttctgggtgttcctacagttcgcctatgcgatgctttccgtgccgttgaccagcgccatcagcgaacgggtgcccgacaagttccgccctcgcatcgaacgctggcatggcatcggtgtgatgctcggccaagcgcttggcgtgtgcatgggtgcgcttggtgtgatgttcaattcgtttacgccgtttagttacaccgccgtgctatttgcagtgtccggtattgccaccgtattgattctgcccaaggagccttctagcgctgagcagccgaaccagctttttgaccgcagtcaggtacttgaccaattgcgcccgccggcccacgctcccgagttctcccgggtgttcgccgcccgtacgtgcatgatggccggtgttgggctgaccggtgtgtttctgtggtatctcgtacgtttctgggtttatggcaaggccgtggtacttacgtccgcgccgctgaccattccggccggattcctcattgccggtatggctgtggccacattgatcggtgccgcgctcgcctcctgggccgccgggccgatttccgagcgaatcgaggaaaagaacattcccgtggcccgtgtggtggccggtgcctgcctgctgtatgccgctggtttggcgctcgcatggggccttggcgtctggtccaccggcactgcccgtgaaaacggcatgctgctgtttgcgttgatttccggattcgcctttggcgtctatgattcgctcggacttgaactggtgatggagtctttgcccgacccgcgccgagccggccacgacctcggcatttatgcgctcgccaactcggccggtctggcgctcgccgccatcatcggcgcgctactggtgaacgccttcgagcatagcttcggctattacctgctcttcccgtccgccatcgtcatggtgctgctggccggaatcgtcaccctcaccaccaaatctgccgaataataaaccggttcgagtacactggtcagcagtgatccagtccagtactcgcaggggagcaaaaccatggtcggcatgcgcgacgtagccaaagcggcaggggtgtccttaagcaccgtttcgttggtggtcaacaacaccggctacgtctcggccgatatgcgtgccaaagtcgagtccgcgatgcgccagctcaactacattcccaacgagctggcccgcaacctctaccgaaaccgcaccaacaccatcggcgtgatcataccgaccatcgcccacccgttcttctccacactcaccgcgcatctgcagcgcgagttcgccgcgcgcgacctcaaaaccctattgtgttccaccgccgatgcggacaaaggcgagggcgaatacgtcgatatgctgcagcggcacatgatggacggtattatcatggccgcccacaccgagcatccggccgactactggacctccatccatcggccaattgtcgctttcgaccgcacgctcggtgagggtgtgccggtcgtccggtctgatcatgaacagggaggccgtctgattgctcgccagctcatcgattccggagcgcgccacgtggtgctcgtcggcggcccgcgctcccagttcgctgcggccaccacgttccccacgattcgctaccatctcaccgtcgagcgtctgctggccgatgccggcattgcctgcgattacgtggaagccggcgccgtggccgacatcgccgcccacgaagccaccgcatgcgccattttcgaacagtatcctgatgtcgacgccatcgtcggctccgatgtggtggcatccgtggcattgcaggaagcctcacgacggggtatcgaggtgcctgctgatctgcaagtcatcgcctatgacggcactctcatggccgaaaccgccggcaaacgcctgaccgcgattcgacaggacttcccggccatcgccgccgcgctcgccgtccgcatggactcacagatcgccgccgacggtggtcccgcctctccggccaagaacgatagcgcttcggacgttgacacccaacccactcccgaagaagtcatccccgtagccctcatccccggcgaaaccacccggtgactcctatcttggctcccctctctgaggctgagctgtgaagcaaacagtccggtggactgtttgtaggcgaaggcgagccgggaggcgagcaggcagactgcgggcggtagcccgtctgtaattgcggccgagctggcggcgtaggcgactgaggggagccgagtcacggccgcccacagtcacccatctcacatgactcctacgtcacaatgtccacaatgtgaacccttgctggattggcaagacatacaaacctatgtttacattccagttcaggtcgaacggcctgaggaaataccgaaaggaggccacgcgatgactggattcaatgcttctgcgtttgtatccgcacgaattattagcccgtcttcgctggcggactaattcggcactgatgcttgaagccccgtcaacgaaggcagggccaatcaagctgacacaatcggcacggccctgcatgatgcggggctttttttgttgcgctcacaaggcttacggcagaatcccgcagacggaaacggtagcggacagtacacggcaacaacacagcgacggaacaacaacctccctgtggggcgaaataatcgcccgccaatgagagtgaacgagagcaaaacaggagtaacaatgactgcagcagtcgaagagactggcttagggcaggcggcaggtaaagccgctaccttggtacgcgattcggtcaagaccgtgatcgccgcgtcgatggtcggtactgccatcgaattctatgacttctacgcctacggcaccgccgcggcaaactacttcccgcacatcttcttctccgcgaaggacaaccccaccgtcgcactgctgatgagcttgctgaccttcgccgtcgccttcatcgcccgcccgctgggctcgctgatcttcggccacttcggcgatcgcatgggccgcaagaccacgctggtcgtcagcctgatgaccatgggtgtcggcaccttcctgattggctgcctgcccacctacgatcaggtcggcgttggtgcagtcgccatcctctgcctgctgcgtttcatccagggcatcggcctgggcggcgaatggtccggcgcggcactggtcgccaccgagaacgcgcctgaagacaagcgcgcactgtacggctccttcccggagcttggcgccccgatcggcttcttcctgtccaacggcacctacttcgtgctcgaatccttcaacaatcaggacgcgatgctggcttggggctggcgtgtgccgttcctgctgtccgccatcctggtgatcgtcggcctcgtggtccgcgttcacatggaggagaccccgatcttccgtatggctcaggagcagaagaaggttgtcaagtccccgctgaccgaggtcttccgcaagtcttggcgtcaggtgctgcaggccaccttcctcgtggctgtgacctacacgctgttctacacgctggccacctggtcgctcgcgtggggcaccaagagctccgccgacggcggcggcgacctcggcttcagcaaccagcagtatctgctgatgctcatggccgccatatgcgtgttcgcgctgttcatcgtgctgtcctgcgtgtacgccgaccggatcggccgtcgccgtgtgatcgtcttctcgtcctgcgcgctggtggtgttcgccttcgccttcccgttcctgctggacggcggtctggtgggccagcgcaacttcgtggccacgatggcgttcctgtgcgtcggcttcatgctgatgggcatcgcgttcggcccgatcggcgcgttcctgcccgagctgttcgaggccaatgtgcgctattccggctccggcatcggctacaacctcgccgcgatcgtcggcgccgcgttcgtgccgaccatcgccacctggctgtccgccaactggggcgtgcactcggtcggcctctacctcgccgtgatggccgtctgctgcctgatcgccgtactgtcctgcaaggagaccaaggacgttgactttaccaagtgacgatgttcacaacgtgaaaacccctaattccactaagtgaacccctacagggcttttccgatgcgacgggactaaacctgcatatcggaaaagcccacaaggaaagccacaacagaatatcgctcagcgaaaccccgcagaacgcaagaaaaaatcaaccccataaataaacaaataaataaaaggagcgccaaaaatggcagcaactatctggtacgagaaggacgccgatctgtccgtgttcgatggcaagaaggtggctatcctgggctacggttctcagggtcacgcccacgcgctgaacctgcgtgactccggtgtcgacgtggtcgtcggcctacgtcctacctccaagtccgtggagttcgccaaggagcagggccttgaggtcaagccggttggcgaggccgttgccgaggctgacgttgtgatgattcttctgcctgaccagtaccaggcagccgtctacaagaaggacattgagccgaatctgaagccgggcgctgccttggccttcgcccacggtttcaacatccactacggctacatcaagccgtctgaggatcacccggtgttcatggttgccccgaagggcccgggccacatcgttcgtcgtgagtacgccgctggccgtggtgtcccggtcgtcgttgctgttgagcaggacccggacggcaagacttggccgctgtgcctggcttacgccaaggctctgggcgctctgcgtgcaggcgccatcaagaccaccttcaccgaggagaccgagaccgatctgttcggtgagcaggacgtcctcatgggcggcatcaaccacctgtgcgacctcggcttcgacgtgctgaccgaggctggctaccagccggaaatcgcctacttcgaggtgttccacgagctgaagatgctcgtcgacctcgctaacgagggtggtctgaacaaggctcgttggtcctgctccgacaccgctcagtacggcgactacacctccaccgtcatcaccgaggagaccaagaagcgcatgcagtaccagctcaagcgcattcaggatggctcctttgccaaggagttcatggatgaccaggctgccggcgctccgaagttcaagaagctgcaggaagagtactctcacccgcacctcgagaccgttggcccgaagctgcgcgccatgttctcctggaataacgccgaggccaaggacaaggatgagaccgagtccttcaacggcaagattgctcgtacccaggttcagtgattgtcgcccctgaaggggatttaagctagcaaaccgccgttcccgcccatacgggagcggcggttttgtgttgttgcgcgcagcgaatcattctcaataacaactatgcgctgatttcttgcaggcaaacgaacaccgaatatgcaaggtcgttgatatctcagcctttccccatatgtgggattgtgcgattctgttcaaaagggtgcagagttgttatcgagaatcgttctctgcacacggctgtccatactccaatagtgacctagctcacgttgtggactccagcggggctgcgacggcgttctcggtaggattgaactcggtttgaaggacacaatcctcgcaaaacaggacttatctgcacaccgtagatacccccggcgcccagcggcgccacaacccactactgaaaaggagtgccaataatggcagcacagatctggtatgagaacgacggtgatctctctgttctcgaaggcaagaaggtcgcaatcatcggctacggctcccagggccacgcccacgcgctgaacctgcgcgattccggtgtcgacgtggtcgtcggcctgcgtccgacctccaagtcggtcgacttcgccaaggagcagggcctcgaggtcaagtccgtggccgaggcttccgccgaggccgacgtgatcatgattctggcccccgaccagtaccagcgcaccatctgggccaacgacatcgagcccaacatcaagccgggtgccgctgttgcgttcgctcatggcttcaacattcactacggctacatcaagccgtctgaggatcacccggtgttcatggttgccccgaagggcccgggccacatcgttcgtcgtgagtacgccgctggccgtggcgtgccggtcgtcgtggccgtcgagcaggatccgcgtggcgacggttgggctctgaccctggcctacgccaaggccctcggtgccctgcgcgccggtgccatcaagaccaccttcaaggaagagaccgagaccgatctcttcggcgagcagaacgtgctcatgggtggcgtgaacaagctcgtcgagatgggcttcgaagtcctgaccgacgccggctaccagccggaaatcgcctacttcgaggtctgccacgagctcaagatgctcgtcgacctgatgaacgagggcggtctgaacaaggctcgttggtcctgctctgacaccgctcagtacggcgactacgtcaacaccgtcatcaacgaggactgccgcaagcgcatggaataccacctgcagcgcatccaggacggctccttcgccaaggagttcatcgacgatcaggatgccggcgccccgcacttcaaggaactgcaggagaagtactccaacgagcgcatcgagaccgtcggcccgaagctgcgcgccatgttctcctggaacaaggatggcgtcaaggatgccgacgaggccaactccttcaccggcaagatcgcccgcgcccaggttcagtgattcttccttggctcccctcgggtgaggtgcgcacgaacagcgagccggcaatcgcagccttcaggctgtccgtgttgcagtacgctggcgcgtaagcgcctgagggtggtccccagtgcataccaaaaggccgccgctccgattcattcggaacggcggcctttcgcttattccaagggatctacttgataacccacgcagaagtgtcggtggggagctggccttcgggggtcagcgggccggacgccagcaccacggagccatcgggcagcgcgaccggggcattgccgaagttggtgattgaggtgaacacccgcccgccaaccgccgcgcgggtgtacgccaccacatcgtcgcccatgtccacctgctcggccgtggtgtcgcgcgtggcggtcagcgactcctggcgaatcgccagtgcggcgcgatacagcgcgagcatcgagtccgggtcggcttgctccacgtccaccgcgtaatccttgaaccacagcggctgcggcaggtgcgggtcggcggccggcgtcacgccatcggcgcgaaccgcaggggagaagccgaaggaagcgcccgtgccgaactggccggcggcgcacagcggcacatggttttcgccggtaccgtcatcggccggagccggacggctgaaatcggccaaggccggctcatcggcggcggtccacggcagcggcacgcggcagccgtcgcggcccttgtccatcgtgttgcgggtggtgtggaaggcggtcggatcctccaagtgatcccacggaatatcggccacctcaaacaggcccagttcctcgccctgatagatgtatgcggcaccgggcaggccgagctccatcagcgcggcggcacgggcacggcgggtgccgagttcgcggttctccgggtaggtggtgccgtcgcgcagcagccagtcgtgtggcagctggtgatacggcgcgcccttgacctgcggcagaccatagcgggaggggctgcgcggcacgtcatgattgttcatgacccacgtggtggtggagccgccggtttcggccgccgccttgagcccggcggcgatggccttgcggaactcgtcggcataccagttggcctgcgcgaagtcgaagttgaaggactggcccagctcgtccatcgaagcgtacaggtgctggtgctcgggcaccacccacgcctcggccacggcgaagcgcggcggagtgtattcgttgaacaccttgcgccattcgcggtagatgtcgtgcacctcgcggcggtcgaacagcgggtggctgaagtcgtggttcagcacgccgaccacgctgtattcgcggccgagctcctccagcggcttggattcaaggtctttggccaggccgtgcgctacgtcgatgcggaagccgtcggtgccgtggtcggaccagaagcgcagggtctttttgaactcctcgtggatgtccggattcttccagttgacgtccggctgcgccttgtcgaacagatgcaggtaccactggccgtcgggcacgcgcgcccaggccgggccgccgaagaaggactgccagtcgttcggcggcagttcgccgtgctcgccgcggccgtcacggaagatatagcgatcgcgtgcgggggagccaggttcggaggcgagggcttccttgaagaacacgtgcttgtcggcggtgtggttgggcacgatgtccacgatcactttgatgccggcctcgtgcgcggcctcggccatcgcgtcgaagtcgtccatggtgcctaggcgcgggtcgacgttgcggtagtcgatcacgtcgtagccgccgtccgccagatccgaggggtagaacggggagagccagatcgcgtcgacgccgaggttcttcaggtaatccatcttctcggtgacgccggcgatgtcgccgagtccgtcgccgttgacgtccttgaagctgcgcgggtagatctggtagacgacggcctgcttccaccagtcgtcattgaggttgttggcggtcatgccgattccttcctgttccgggtgcgttgtggttgggttgttccggttgtgctcgaactgctgtgtgaaggcccaaccgttgtattgatgatgacaacgatatcatgtgaattacgcatgcaaaagtcgatttatcggcgttttgcggtggtaacgtagtcacgcctgcgcggacgctgctgttgcggcaggcggcgcggtggtttcgcgcagtattagcggagtgtccggccgtacgaatgccggttcgattgacttgcccgcaatggcatccaataccatgtgcccggcggccacgcccattgcgaacgggtcctgatgcagtgtggtcagtcccacggcggcggacagggtggaatcgtcgaagccgatgatggagatgtcctgaggtacccgccgcccgtattgacgcaggcgatacagcacgggtgcggccatttcatcatcctcaaaacagaaggcggtgatgctgggggaggcgttcagtacggtgttcaatgccgcgttgctttcgccaagaccgcgttgaatgctcaggggcgttagctcgatccccggatgggcggcagcggcatcaatgacgccctgcaaacgagcctcggcactgtagcgcatgttggtttcggtcggggcgctgccgacgaacgcgatatgccggtggccgagtgcaatcaggtgctcgatggccgaacgtgtggcggcgtaatcgtcaatgctcacgcctgcgtcgaacccatcggtggagggaatgttgatgccgacaatcggcacgtgcatatgcttcagtcgctccacttcagccggctcaatgtcgaaggagctgacaatcaccgcatccgcattgcgtcgcacgggcaaatccgcaaagaagtcatggcgctcggcggcgttgcgcatggggtagggcacagtgtcgtagccggaggggcgcagcgccgagtcaaggccggcgaagatgtttgcattgaaccaggtggtgatggtctcgctggccagcagcgcaatgcggaacgactggccggacttcagtgcggcggccgagcgagagacggagtagtcgagcttttcggccgcggtcatcactcggtctcgagtctctggaagcactagatccggcttggcgaaggttcgggacaccgtggatacggaaacgccggcctcgcgggccaccgcttgaatgcttgccttggtcatatgccgtcgctccttcgccgtcgcgaacaatcattgtcatgacaacgataacatgcccataacaagtcatcgtcttcggctatctcgattacgaggggctgatttagaccaatttcccattgccggaatcgatcaccgcttctctcggcgcatcacggcggacagggactgcacgcgcggcaggtcgaagacctcgtcggtgtgcactacgtgcccttcgccatctgccagcggcacgcgccagttcgaatactctctggaagtgcccggctgattctgggagcggcattcgcccacgccgtccaccagcgctgcctgcagcagcagcgacggcgtatcggtgagcatggcgtgcatcgcttccacgatttcctgcacatggccttccacatcatccgccacggtctgcgagatatagccgttctccaccagacggttcatcatggccgtgcgctcggccatcgccgaggcggcgaatgcctccaccggctcgctcaggagatgcagctcctcgcgcagcttgacgtgtgcgaagttcaggtagccggcggtgggtggcagatcgtgcgtggtcaccgaggccaatgcctgtttgcgatagtccttgggtgcgcggtacgggtcgccggcgttcggcgaatcgtccacgcggttgaaccattccacgtcagtgccgagcacgccgtgatcggccagaatgcggcgcacgtaatccggtacggtgcccagatcctcgccaaccaccatgcctccggcgcgcgtggcctcgatggccagtactcccaacatcgcctcgtggttgtacgtcacgtatgcgccgttgcgggcaccgagcccctgcggaatccaccacaggcggaacaagcccagcacatggtcgatgcgcaccgcgcccgcgtgctcgtacatcgaatgcaccatctcgcggtacacctggtagccggtggcctccaggtagcgcgggttgaacggtggctggccccaatcctggccctgctggttatagaagtccggcgggcagccgaccgtgacgccacctgaggcgaagcgttccggattggcccaggcatccgcgccgagcccgtgcacgcccacggccatgtcctgcatcagccccagcgtcatgccgtggtccagcgcctcctgctgcgcggcgttcacctgctcggcagcgatccactgcagccagcggttgaactcgaacaggtcgtggtgctcctcgacgagctggcgcacggccgggtcgtcgatggtcttctcgaagaaccaacggttctcgccccacggcgcgccccatacctcgaagcacaggcaccatgtggcgaaggaatcgaggtccgggccggcggtggtcttgaaatgctcgaattcgagctcgcgcttgttgttgcggcccgcttcgaagatcaggcgcagcgccgggcgcttggcctcccacgccgcgttgatgtccatcggggtcgattcgtcgttgcgcgcggccaccgaatcatgcagcgcatccacctgcgcgcgcacgtcggccggcagtgtggcatattcggggatatcctgcggccggatgtacgtcacgttgaggaatcggcgcgattccggtagatacggcgatggctcaagcggcggaatcggcgcgccggcgtgaatcggattgatgagcatgaagtcggccttggacttctcggcggcatctgccaaaagacgcttcagatcgccgtaatcgccgatgccccacgattcgcgggaccgcacggaatacatctgcgtcatccagccccaccgctggtgctcggcgaccgcctccggcacgggaatgcgcgcgggggcggcgatgatggccgccttgccctcgcgcccgtcaaccgtgacggtcagcgtgtggtaacccatcggcaggtcgggtgcgatggtcaagtccggcttgccggaattgaggttcggcagcagggcaaagtggccaaacgcggtgccgtcctccagttcgatggaggcggtgatgtccgcgtccgacgagcagttcagggtgatgccggtcggtttgccggtggtggcgacgatggtggaggggagcaaacgtttgctgttttccacctcaagttgggtcatggagcgtacgatggcctcgtcgctggatgcgtccacgtcgagggccttgagtacggcgaccaaggccgcgtcgctgatttcggtgtaggtgccgagctggtcgatgaatgaggtggcaagtccgcaggctttggcgagcttgatgagcgggcgggcgagtcgttccgtgctttccgcgcgctgcggggcaccggaagcggcgttgttggtggtgtctgcgatggtgccggtgctggttgctgcgtcgttgccgtatgcgtcggtcatgatgactccttgcttgcaaatcgggtactgctagtcgtttgcattgctgttcgagggccgctctgcgttgaggttccggcaacctgacagaccaatgttcgagctgttctgcctctaccgtaactcatattgacaacgattgcaatacattcggtgagttggacgaggctagaggtgttggtgtttgtcgtgatggcccgttgactatccccagtcgactttgccgacagcctcgccggcggaggtgaggtcgaacgggtttaaccaaacacgacgaacgattgcggggagagcgtcagctgcccgccgctcacggccggttcaccaagactgagcagcacgtcggcgtcggaagagagctcgtccggcaggtattccgtgaggaatgaggcgattgaggcacctgaatcggcgttgaaataactggaatcgccttcgtgctccataggcgtgtcggtattgcgcagcaacaggttgtagccgttcgggtggccgtcccggcgccagtcgaggtagaggtccatgtcgaagccggcctgcatcgattcgttcggatggcctggacgccatcggcggaccgacctgggtggattccgataaggcggccgtatgggtgaccaactgggacaccgagcgcaacggctcctcgctcaccacccgtgacggcaccagctatctgctcgccaacgccttcatgctcgcctacgattacggccagccgcacatcttctccggctactactacgccggcgtcgacgacggcgctcccggcgccacccgcacctccgtgccggacatgacctgtccgaccgacggcatcgaaaccgccggcacctggcactgcgcgcaacgctggaccgccatccgcggcatgatcggcttccgcaacgccgtggccggcaccttcaccggcaccgtggccaagggctcggccgtcgccctatacgccggcgcgacgcccgcaaactgggccggcacccggaaatacgatccgtccgatcccgcctggttcaccggcgaaacaccgcataagggcgatgacaccgccgccaagtccgccgattccgcagcgtccgccaagtcaggcgacgccaagtccggaaaggcaacgtccgatgccatccgccgcgccgcaacgctcgccgccatcctcctgcccgtcaccgtcggcgtcacgttcatggcgatagctcgcaggaacggcaaagcccagtccgacaacagcggcccgaataacgactgattcggccccgctcagccgcgcacccgcggcgcggcggtggagtcgcgtaccagcagttgcacggggaagatctcgtgcggctggtccagggtgcgcccctcgataaggtccagggccttgcgcgcggcggcgacggccatgtcgtacggcttctggcgcacggtggtcagccccacctcgcccgagaacgtgctgttgtcgaatccggtgacggacaggtcggtcggaatcgccatgccgcattggcgcaggcggaagaacagcggaatcgccagcgaatcctgatggaagcacagggcagtcggggcgtcgtcgcgcgcgagcagcgcggtgagggcggcgtcgaccggatcgtcgccggcctgcatgtccatcgtctggccggtcacgccgtccagttcgctgcacgcctccaggaatccggtgacgcggttgtgcgagctgaagcccatcgtggcatcgaacgtctcgtacaaatacaacaggttgcggtggccgagcgtggtcagatggcgcacgatcagccggatgccggccttgtcgtcgatgcccacggaggcggtgaacccctgcgaggccgtgttgatgccgatgagcgggatccgcgtggtgttgagtcgcctgatttcggccggggtgatggcgaacgacgagacgatgaccgcgtccgcgttgccgcgcaccggcagttcgtcgaagaactcctcgcgcgcgcccgcgtcgccgatcggttggatgaccagatcgtagccggccgatcgcagcacttcgttgaggccttcgatgatgcgcgaggtgaaccagtcgagcttgctgctgcccaccagcagcgccacgcggtgggagcggcccgatttgaggatgccggccatgcgggataccgagaagtcgagttgttgggcggcctccatcaccttggcgcgcgttttggcggagaccatgtcagggcgggagaacgcgcgggagaccgtggcggtggagacgcctgcttgcctggcgacgtcctcgatgctggctttcatggcccctcccggtttttcaaagttgacggtgtgacaaacttctcttcattgtaaatcattgcagtacgttttacgacagtcatagtgcaatgggttgcgatattgcgacacgccgaaaatatagaccaatatggtctcaatagctttggaatgtaacaggttgcaaatgtaacggtttgcatggctgagaaagccgggttgccgaactagttcgacacccgtatactgaaccgtgttcacttagagcttgcgaggaagtaagggagataatgaagatcaagaaatctctcgccgcgctgactgcaaccgtgagcattatggcacttgcaaccggttgcagttcgagcggttcgtcaggcgtcgtcgacacccaggccgacaagggcctggccgtcatgggcgacaccatcacctacgaccccaaccacttggtcaacgacggccagcccatcgaactgggctactggtcctggggcgacgaaagcactgacccggtgatctccatgctccacgagtacgagaagatccacccgaacgtcaccttcaagatctcgcaggtggcttggagcgactactgggtcaagaccccgctctcgctcaagggcaacaagaacgcccccgtgctgttcaacgtccacaactccgaggatgccctgctccgcccgcacgccgtccgcctcgacggcgccagcgactggcgcatcttccaccaggtggtgctgccgatgagccgcaattccatcgccgcgctcgccatcttcaccttcctgtggaactgggaggactacctctggccgttcctcatgatcaccgatgacgacaagcagctgttgtcggtgggcctcaagatgttctccggccagtacggcaccgattacggcggactgttcgccgccacctccgtggccatcatcccggtggtcatcgtctacctggtgttccagaagcagttcatcgccggcatcgccaccggctccggcaagtaaacccggccggtttcggccgaatccgaactgcgccgcggtctcccaccagtcccggggagccgcggccgcatcactcgtatcatcgtggataaccgtacagaaagagtaaccatggcacaatcgccacaactcaagcattcgtctccgacctcgcccgatccgcaggacttccgcctcgacgccacgccggccatgcgcgccgacaatgtggtgtccggcgaccactggcgcatcggactcatcaccgattcactcgtgcgattcgaatggtccgattccggcgtattcgagaaccgcccgacccagaccgtcctgaaccgcgatttcggtagcccagtcgaacgccgcgtcaccgagcgtgacggccgcgtcatcatcgacaccgcggccctgaccatcgtctacgaccagcagccgttcagcaaggaaggcctgagtgtggtcgtcaaaggcgtggccgacacccagttcaacacctggcattacggcgacgcccagcgcggcaacctcaaaggcaccgcccgcacgctggacgaggcggacggcgccattgagcttgacaacggcgtgatctcgcgcgacggctgggccgtcatcgacgattccgccgccaacatcatcatcgaaaccgacacagtgaacggcaaggcgaacccgttcggcacctgggtatccccgcgcgccaccgccgaaacggacttgtacttcttcggctatggccaccgctacatcgaggccgtacgcgacttctatcgcctgaccggccccacgccgctcctgccgcgcttcgccatgggcaactggtggagccgctactaccggtacacgcaggacggctatctggccctgatggaccgcttcaagcgcgagggcatcccgttcaccacctccgtgatcgacatggactggcatcgcgtggacgacgtggacccgaagtacggttccggctggaccggctactcgtggaaccgcgaactgttccccgacccgccggccttcctcgccgacctgcaccggcgcggcctgcgcaccacactgaacgtccacccgcgcgacggcgtgcgcgcgttcgaggacgcctaccccgaagtcgccaagcgcgtcggcatcgacccggccaccgaggagaacgtggaattcgacctcaccaacccggacttcgtggacgcctatttcgacatgcaccaccgcatggaggccgaaggtgtcgacttctggtggctggactggcagcagggcggcgtgacccgccagaagggtctcgacccgctgtggatgctcaaccacatgcactacctcgactcagggcgcggcggcaactggccgctcaccttctcccggtacgccggccccggctcccaccgctacccggtcggcttctccggagacacgatcgtgacctgggaatcgctcgccttccagccgcagttcaccgccaccgcttccaacatcgggtatggctggtggagccacgacatcggcggccacatgttcggctaccgcaacgaagagctggaggcccgctggtaccagctcggcgcgttcagcccgatcaaccgactgcattcgtccaactcgccgttctccggcaaggagccgtggaacttcaaccgtgacgtgagcgccgcgatggtggacgcgctgcgtctgcgccacgcgatgatgccgtacttgtacaccatgaactaccgtgccgccgaagccggccgtccgctggtcgagccgatgtactggcagaacccggatacgccggacgcctacgaggtgccggacgagttccgcttcggcaccgagctcgtggtcgcgccgatcgtctccccggacgatgctgccgcctgccgcggccgcgccgacgcctggctgccgcagggggagtggttcgacttcttcgacggccgccgatacgtctcatccgacgccgccggccgccgactggaggtctggcgctcgctcgaccgcacgccggtgttcgccaaggccggcgcgatcgtgccgttgcaggacgtcgcggaatccggcgaagcgatcaactctatcgccaacccgcaggccctgcgcgtgctggtgttccctggtgccgacggctcgttcgtcatgcgcgaggatcgcggcacgtggggcgccaccagcgccgacaccgcgatagcgttcacgtggggcggggccgatgcgtcgcccagcgccttcaccgtcgcgccggttaccggcgatacgtccgccgtacccgagtcgcgcgactggacggtcgtgttccgcggcatcgcgccggtcgatgcggccagcggcgtgcgtgcatggtccggcgaggctccggtcgaggcaacggtggcgtacgacgaggcgaccatgagcctgaccgtgtccgtcaccggcatcagctcggctgccagtctgcgcatcgagattcccggcggtctgcgcatcgccgacaatccggtcgaatcggacgcgatggacctactgctgcacgcccagatgctctaccgcaccaaggagctcgcgctgcaggcggtccacaagctcggcatcggcgcgatcggcgccctgcgcaccatgaaccgtggtccgcgctacgccaacgatttctggatcaccgacatgcccgatgcggtggccggcgcgctcgaagaaattttgctgcgcagctgagcccggttgcagttttctgcaacatccgggtgcgccccggtatgcggcgataagttcggcatggttgccgaagagcgtggcataccgggtgcagtgcgtgggatggccttcgcgattgcactcatcgtgcggtcagtggaaaggaacttttcatgcacaaggtgaaacagcacaagggcgtcgcggtggccgccgcagtctgcgcggtcgcgatggcggcctcgctcgcgacccacgccggcgcggccggggaccggcgttattgactggctggcgttatcgagtgattggcggtatcaattagccggcgttattgatgagccggcgttgtcgattagccagcattatcgaccggcactgaagcatgcagtacccactgcccgcgtttctcccgcacatcccaatccccatgcgcatgcagcacacgctcccgatagtacgcaagcccggaatgccgccccctcaaacgtcgcgtcaccttgacgcggacggtccgtcacatcaatggtgacgcggtcctgagcggcggaaaccagcaccacgtaacgctgcgtcggatcgtcatacctggcgatattgccgaacaattcccgcagaaaatcggcgacaaacactgtgtctgagttattcagcgcatcgatgcccccagcgacaataacgtcgccgacacaccccatgcgctgcaatcgcgcgccgccgctggcaagtctgatgacaaggccgatgtcgcgccccagtcaccccttgcagttttctgtataagtggattttggctccaaacgcaccactccgtcatcgccgtcagtcactcccgcaaaaacttgagccaaacatactcaactttttgtgttgaaattgggaatagaacttgccaaatggaagttgagtgatgtaggctcaagtttggaaggtccaagagacgacccatcggaacttgggcaaagaacgtaagaacaaacgagtaattaaggagcacacattatggcacgtgcagttggtatcgatctgggaaccacgaattcctgcatcgcaactcttgaaggtggcgagcccaccgttatcgtcaacgctgaaggcgcgcgcaccacgccgtctgtggtggccttctccaagtccggcgagatcctcgttggcgaagtggccaagcgtcaggccgtgaccaacgttgaccgcactatttcttccgtcaagcgccacatgggctccgactggaccgtcgacatcgacggcaagaagtggaccccgcaggagatttccgcacagattctgatgaagctgaagagggacgctgaggcctaccttggcgagcccgtcaccgacgccgtcatcacctgcccggcatacttcaacgatgcccagcgtcaggccaccaaggacgccggcaagatcgccggcctgaacgtcctgcgtatcatcaacgagccgaccgcagccgctctggcctacggccttgagaagggcaaggaagacgagcgcatcctggtcttcgacctcggcggcggcaccttcgatgtctccctgctggagattggcaaggatgatgacggcttctccaccattcaggttcaggccaccaacggcgacaaccacctcggtggcgatgactgggatcagaagatcatcgattggctggtttccgaagtcaagaacaagtacggcgttgacctgtccaaggacaagatcgcgctgcagcgtctgaaggaagccgctgagcaggcgaagaaggagctctcctcctccacctccaccagcatctccatgcagtacctggccatgacccctgacggcaccccggtgcacctggatgagactctgacccgtgcgcacttcgaggaaatgacctccgacctgctgggtcgctgccgcacgccgttcaacaacgtgctgcacgacgccggcatctccgtgagcgacatcgaccacgtggtgctcgtcggtggttccactcgtatgcccgccgtcaaggaactcgtcaaggagctcaccggtggtaaggaagcgaaccagtccgtgaacccggatgaggttgtggctgtcggtgccgccgtgcagtccggcgtcatcaagggcgaccgtaaggacgtcctgcttatcgacgtgaccccgctgtccctcggtatcgagaccaagggtggcatcatgaccaagctcatcgatcgcaacaccgccatcccgaccaagcgctccgaggtcttctccaccgctgaagataaccagccgtccgtgctgattcaggtctaccagggtgagcgtgagttcgctcgcgacaacaagccgctgggcaccttcgagctgaccggcatcgctccggctccgcgtggcgtcccgcagatcgaggtcaccttcgacatcgacgccaacggcatcgtgcacgtgtccgctaaggacaagggcaccggcaaggagcagtccatgaccatcaccggtggttccggcctgccgaaggacgagatcgaccgcatggtcaaggaagccgaggctcatgaggctgaggacaagaagcgcaaggaagacgccgagacccgcaaccaggccgaggccttcgcctactccaccgagaagctcgtcaacgacaacaaggacaagctctccgacgacatcgtcaaggaagtcaccgacaaggtcaacgctctgaaggaagccctgaagggcgacgacaccgagaaggtcaagaccgctcagaccgagctgatgaccgccgcccagaagatcggccaggtcctctacgcccagcagggtgccgagggtgctgccgccggtgcggctggcgctgacggtgccggcgcttccgctggctccgcctccggttccgacgatgacaccgtcgaggccgaggtcgtggacgacgatgacgacaaggacaacaagtgatgtccgagttcaacaaggacgactacctgaacgacctgccggatcccccaggccgctcaggcctcttcaggggctgacgcctccgccgagtccggctctgcgcaggattcggctgcccaggctccttccaatgaaggagccgacgcggctcctgccgcagctgagggagagaagactggcgaaggccagtccgattccgcagacaccctcaccccgctcggcaaggccaagaaggaagccgcagactacctcgaagccctgcaacgcgaacgtgcggagttcatcaactaccgcaatcgcacgcagaaggagcaggagcgcttccgccagcacggcatcatcgacgtgctgaccgcgctgctgcccgccctcgacgatatcgaccgcattcgcgaacacagcgagatggacgactcgttcaaggccgtcgccaccaagattgacaaggccttcgagaagttcggtgtcgagaagttcggcgaaaagggcgaggacttcgaccccaccaagcatgacgcgatcctgcacaagccggacgcggatgccgaaaaggaaacggttgacaccgtggtcgaggccggctaccgcatcggcgatcgcgtaatccgcgccgcccgagtagtagtagcctccccgcaaaactgacatccagctcgctgcaatgagttgacagtgccttagctccctctgatgagggagctgtcagcgaagctgactgagggagagaagccggccgcaggccgcggaagacagagggccacattcttgatgcccatagtccccgctatctttccctccgtcatcgctgcgcgatgccacctccctcatcagagggaggtgcaattacataaagacttttctagaaaggagacatgaatggctgaaaacgaatggctcagcaaagacttctacaaagtccttggtgtctccaaggacgcttcggacgacgacatcaagaaggcgtaccgcaagctcgcccgcaaataccatcctgacgtcaacaagaccaaggaagccgaggagaagttcaaggacatctccgaagcctatgacgtgctgagcaagaaggaagatcgccagaagtacgacgcgattcgtcagttcggcatgggcggtgcccgcttcgccggcggttccggcggcttcgatgcttccggtttctccgacatctttggttccatgttcggccagggtgccggcggcaatggctcgcgcatccgcttctccacttcgggcggcggccccaacaacatcaacgacatcttctcgatgttcggcggtgctgcaggtcagggcggccagccgtatggcggctacggccaatcgccgtacggcaatgccggcggctatggctatgaggaggccccgcgccccgaaaacggcgaggaccgcaactccaagatcagcctgaccctgcgccaggcggtcaagggcgctaccgtgtccctgtccgtggacggcaagaagttcaaggcccacgtgcctgcgggcgtcaaggacggacagaaaatcaagctggccggcaagggcaagctaggcatcaacggcggcaaggccggtgacctgtacctgcacgtcaccgtcaagcccgatgccacattctcgatgcgcggccatgatatcgtcatggacctgcccgtcaccgtgggccaggccgtggccggtggcaaggtcgaggccaaggatatcgacggcaatcccgttaccttcaaggtgccggcaggctccagctccggcgcggaagtcaagctcacgggacttggcgtccagcgcagcaaccagccgggcgatctgatcggccgtgtgcagatcatggtccccgccaagccgggtctggccgtcaagcacgccgccaaagaattcgacgaaaaagccggcgactatctcagcctgtaatcaggaggtgaacaatggcgcggttagccaaccagatgaagcagttatacgcgatgtgcgcaaccgcgctcgtgatgggcagggccgatctcgacggagccgatgacgtcggcttcgacatcgaactgcccatcttcaccgtcggccagaccgccgagttggccaacattcacccccagactctccgtcagtacgaccgcctcggtttggttcgtccgcagcgcaccgatggcggcgcacgccgctactgcctgcgcgacattgcccgcctgacccgagctcagcgcctgagccaggatgagggcatcaatctttccggtatcgcgcgcattttggtcctcgaagaagagaatcgccaactgcgccgcgaagtcaaacgcatgcaaaccggcgaccaggagagcgttttcgccgcaggccgtgacggcaatatcgtggaggtacaacgctccaaccgcgcccgcctctggcgcaacgccatccgccgcgaaacccgcgaactgcccggccgcgatactgccgccgatatcgctgccggcgccaccggcgactccaactacactcccgccgactccaagtccatggtcctgtggggttggtgagtctggccgcattgcttcgattccttctccattcgtaaaactgtttgttatctcacatcgggcagctgccgaaaaaaagcacgaatcttcttgacggagatgtcaaggtttgttacggtgacgtgcgaaaaccgattcgtaaggggtgctttaggctgagacggtatgtgccgaacccttcgaacctgtgagctaacactcgcgtagggaatgcgacggttgaactcctctgttcggctcggcatcccatatgcgcgttgagagagaggaagcgtatgtcaatacgcaaggagctgaccgcccagaacgtactgctgggtttccagcatgtgcttgtttccaacgtctggcttgatccggtgtttgtggccggagcaatcggcttacctattgccctgtcgtcgaacatgattaacgccatcttcatcgtctctggtctggtcactttggttcaggccactcggctggttcgcctgccggtggtgcaggggccgtcagctgcgtttgacgcgttgatgatcgcggcaggtacggccggcatgctgggggcggcgagttcgtccattctcatcgcttcgcttgtgttcctgttgctgtgcctgaccggtgtgatagagcggatgcggttcctgttctctccgatgatttcgggcgtggtcatctttatggtcggtgtctcgctgtctggattcacgctgagcgagtttctaggcggggctcccggcgacaagacgttcgccgatccgcacatcctgaccgtgtcgattctgaccacggcgattgtgcttgtcctgtcgttgctcggcaagggcctgctcaagtcgttctcattcctcatcgcgctcgtcgtcggcaccgtggtcgccgcagcgtttggcatggtggacttctctcctgtggcatccaggggatggttgggcctgccgaccttcctgccctacggtccgttcacatttgactggaagatcttcatcccgttcttcatcgcctacatggttgccgtcatggaagctctcggcgtctatcaggcggcttctgagattcagggcacgcccctcgaacgcaagcaggtgcgctacggtcttgccggcgaggcggccggttcagccatttcctcgctgattggtggattcaccaccaccgcctacccgcaaaatgtcggcctgctcaacctgaccggcgaaggcaagttgcgcacgcgcacgcctgtgatcatcgccgctgtgctgttgctgattctgggcttcgtgccaaaggcgggcgcgttgctgtccgtcattccctcggcagtcgtcggaggcattttcctgccggctgcggccagcctaatcgtgaccggcctgcgcgccctgcgcaaggtcgctgatgacgagcgccgtcaaacggtcatcggcatgtctctgttgctcggcatcgccctgcccaaggcgctctccggcctgaccggcggcgcaagcgtgttctttggcaacaacatcatggtcggtgtattcagcgccatcattctcaatgcgcttttcgtcgctcttccggatttggtggcgaagcatcgtgcgccggcgtccgtggatgttccagcagccgatccggcggatgggactggcgctgcggcgtacgatgaacgataatgctggttgatattggatattgacaggagcgatgcaatgactgatgtgatggatgacgcgcgtcgtatcaagcgcgggattctggattttatccatacctatggctgtgagcaggccccggaagaggcgtttggtgcgttggcgcgcgacgtgttcatctatcagtacacgtatgatctgccgtaccgtcgttactgcgcggctaaacgcgtcacccccgcaacgctcaaggattggcgggagattccgccgatgccggtggacgggttcaagcaccttgacctttcgaccataccgaccgagcagtgcgaagccgtattcatgacgagcggaaccacgcatggcggcaagatgcgtgggcgcaacttccatcccgatcttgaggtgtgggatgaatcaatgattgtgccgttccgtcatttcatcatgccggatcgagagcgtatccgcatcgccgtgatttcgccggcatgggacatgaaccagaactcctccctgtcgcgctaccttaccaaggccgtggagtgctgcggcagcgaaggcagcggtgtgttcttcgacgagcatggactcaagttcgatgaaatcatcgccttccttaaccgtgcggtgtctgacggtgaaccggtgatgctgatgggtgtctcgtcgtcctatctgtatctgctcgattacctgcatgagcatgatctgacgttcgcgctggcccccgatagccggttgttcgacactggcggcttcaagagcactaagcgcgacatcaccgaagaccagatgcttgatgagctggaacagacactgggggtgccgcgccaccactgtgtcaacatgtatggcatgaccgagttgagctcacagatctatgaccaaaatattctgtcgtggtatacggatggcaccagcaactatctcaaggcgaaccccgcctgggtgcgtacggtcttcctcgatccggaaacgctgactcccgtcaaggatggtgagaccggtgtgatagcccattacgatcttgccaattggaattcatgcatcggtattctgaccgaggatctcggccatcggaccccggacggattcctgctgcagggcagggcgaagggagccgaggctcgtgggtgctcaatcgcggtagacgaggtcatcagtgccaaccgttgatgaatccgtgagtcaggccattgatgtcttccacctgccctcgggagtggatgtttcggattacgaaatctatgaggtcgccacatcggatggggtgaagcgtttgcgctatccgcgactggatggcccaaaggtgacttcccttgccaagcagcttgccgatgttcgcaaccgcacgcttgccgcgatgagtgtcaacgatattctcgacatcgtggccgacgcggcccaactatgggccgatccggattttgagctgcggcgtcaggctgaactgctgattcccgcaatcaccggatatgagcctgacatggtgcggattgagctcaaacggtatatgcgccagttcaggcgtcgtgaactgctccggttccttgactccgaaatcggtcagccgtctatgctcgacgaattccggccgaacaaggcggggggatactctaaatatgtgggcccagcgctcacctatcaggtgttctccagcaatgtgccggggattcccgtgtggagcatggcgatgaccctgctggtcaaaggcgcgattcttggcaaatcttcattttccgagccggtgatgcctgcgttctttgctcgcagcattgcgatggtcgattccgacctcgctgatgccattgcggtggttccatggaagggcggctcgcagcagctcgaggattcagccatcgatgcggccgatgccgtgattgtttacggttcttcgcagactaccaaattgattgcgggcaaagtcgccgggtccaagccctgtctaggttacggagcaaaagtcgggttggcgttcattggccgagaggctttgcgtcctgatacctatgccgataccgtgcatcgtgtggctgttgacatcgccacatatgaccagcaaagctgcctggctccgcagaccgtgttcgtggagactgatggagccctcacccctcgtgaagtggctcagctgctcggtggcgagcttgagaatcagcagcgcaaatatccgcgctccgtattgagtgacgccgagaacgtggccattcagcgggcgcgcgccgacgctgagatgagagccttgatgggcgggaaggccgcggtgttcgccagtggccatagcacggcatggtcggtgctgtatcgagaacttgacggtagcggtgccgacgaggatgttgcttcgctgatgtcgccgttgaaccgcaccgtcaacgtggtggcggtgccagatttgttggacgctgccagaagactgacttcctgccgtggctggctgcagagctgcggtgtcgctgtggattcaaccagactgtttggtcttgcggatacattggccgaggtcggtgtgaatcgcatctgtccgctcggtgagatggatcgggcgaaatccggctggcatcatgatgggggcttcaacctcatcgatctgttgcgcgcggtggatgtcgaacgcggcagcgacgcgtacagcgattcgttcgatatggatatggaataggcctgtgctgttgcgggcagcagaggctggtagcagggcgaaaggcaagggtaatgacagagcaaagcgatatggcacggcgtccaatggtgaatctggatggcagaacagcgatcatcaccggttccggcaagggcataggagcggctgtggcgaaatgcctggcatcgcacggagccgctgtcgtcatcaattacgtacatgacgccgccagcgcgcagcgcaccgttgaagacatccactcgctgggaggcttggctatagctgtacaggcggatgtttgcgatgaatcgcaatcttccaagctagtgggtaccgctgtcgactcattcggcggcgtggacatcttagtgaataatgctttcggacgcttctcctttgacccgcgtcgccgttccacttttgctggaggcgattgggatgagtttagcgcacagatcgagggatgcctgcatggtgcatatctgatgtgctcacatgtggtgccgctgatgcgagcccagacctccgggcgtatcatcaacatctccagcaatctggtcgattcgcccatcgtgccctaccattcgtatatcactgccaaaggcggcttggtcggcatgacccgctctctggcccaggagctgggcggcttcggcattaccgttaatgccattgccgcaggtttgacggccggaaccgcatccagcgcagccaccaccgaggatgttcgtgaacgaatcattgccatgacgcctcttggccgccttgcccgtcccgatgacatcgccggaggggtcgcgttgttggcgtccgacatggccggcttcattaccggacaatgtctgcacgtcgatggtgggctgaccatgcgctgaggcgcaggggcggtgtgctgacgcgctatggttgtcgcatccgattggtgcaatggaatgcagcaagagtaaaggcgccaattggcgtgcgggcatgtggacggaggtaactatgctgctcaaagccgtgttctgggatttggacggtactctcatcgattctgagccgctctggcatgacggtgagattgagatcgcgcacaacaatggcggcgagtggaacgaggacctcggttgggagtgctccggcactccggtaccacacgtggcagaggtcatgattgcgcatggctgcacattgagcgttcccgaaatcgacaagcagctcaaggattatgtgttcaaggcggaggtcgaacgtctgccgtggattcctggtgtgcaagacgtgctgcattcgctcaaggaagccgacatcccatccatgctggtcactacttcgcctcgccgcatggccgagaacatcatgaagcaggctgatggattgcttgccggctacgtctgcggcgatgatccgtacgagcacaagccgagccctgccccatatctggccgcggctgagagactcggcatcgcgcctgaagacatggtcaagtgcgtggtaatggaagattcctcatccggtctgcgctccggcgccgcctcgggggccacactgattgcgcagactggctggattcgcaccgacacttccggccttggccagtttgcctccatcgactcgtatgagggcatcgatgcggccgcgctggacgcctttgtgcggcagcgtttgggggagtagaaatttcgtttgtattgcggagtttgtgtgggaaaccccagtcgacctgatgttataggccggctggtagggtatttgacggtttgcatataactgtctggttcattgggctggcagctcaatacaagatttaggactcataggaaacacatgggcttcgttaatttcatcatcgaactgctgaaggatccgcgtgccgcgattgccggttggattgccatgggcgtggcgccgaccctcggattcatcttcctcatcgtattcatcgaaacgggcgtggtgttcttcccgttcctgcccggtgattcgctgttgttcgcggccggcgtgttcgcagccccggatgctgcgaccggcaaggccgcgctgccgctgttctggttgctgccggtggtttggtgcgcgccgattatcggcgaccagtgcaactacttcatcggtcatttctttggccgccgtattatccaatccggcaaggtgaaggcgctgactcctgagcgactggccaaaaccgagggcatgattgaaaagtggggcccgctggctgtgttcctgggccgcttcttcccgttcattcgtacgttcatgccgttcatttccggtatttccggtatgcgttggagccgtttcacgccgttctcagtgctcggtggcctgtgctggtccacgttgttcacgctgctgggctacttcttcggcaacattccggccgtgcaggatcacttcgaactggtgatcgtgctgattctgctggtttcgctcgccccgaccatcatcggtctgctcaaggccaagttcggcaagaagaagccggccaaggtgaccgatgctcagttggacgtcatggaagacggcatcaagaacctcgataagtaagcaaggaatgtagattaccgcataaggaatcgtcgtgaaaatgaaggccctgactgtgcatatgaggtcagggccttttctgcatgagatgggcgtgaaacaacagcgtggttatccacatttgtcgtggacgacatgccggggtgtggataactcagcaagctagaaccacaatggtcgattcgtgttgagcattgaactcggacacgtttcaatcggcttatgaatagcaacaccacaccccgcgtggcgcgtaggatcacctcgccagcggtagcacctccgggcattccgctgcccacggacgatgcgccgattccagcgcatcgctactacactccgccgcccaggccgttggcctcatgcgaacggcagagatcgggcgaggctccggcactcgccctaactacagacaccagcttccataacattgtgacgatgacgtcaggtcatggaggcgtggggttgagtgtcatggcttccatgcttgcatggacattggcgagacgtgaacacagctgcgctctcatagacgctgatttcgtggccggatgccttgacctgctgcttggtgtagaacgagagccgggtttacgattcagccaagtcgacgcacccctcggccgcatcgagggcgatgcgatgaaccatgagctgatgatgtgggagggtgtgcgagtacttccctatgacccttggagcgcgcgccagcctgactggtgggaagttcaagcggccattcgagccttggcggaaacgaacgacgttgtcatcgtagatgccggtcagggtggactcattgagaccgtacccgatctgcgcagtggcatgcaggtgattgccgcggaattgtcggtgatggggctggccagagccaagtcgcaccggtccagactggattcatggggctgtgaagcgccacatatcgtcggcgtggaaccacgtggcgctccacgtgggagaggccacgtgggtattggtgaggcgcaggactatttgactgccacggtattggggcctgtcaaaccaagtgtcaatctgtgtggagacgtactggaaggcctcggcatcagatcggtgaccaaaggcagccgcaaagccgtgagcttgcttgccgatcttgtcgagcaggccattcgcccggtttcgggagcttcttgcaaggaccggtgatgcggtatggctgccgtaatcactcgggctgatgagcccggcgcagtgcccagaactgtgttcttcggtctattgaatgatgtggcatccgacccgcaggttaccgatctggcggtgacctgtgatggccgcgtttgggcggaccgcggcaacggcatgcgagaaacagtattgcgtgtgccgtttcgctcgccgcaagtagttcgagaatacgccgtccaactgtgcgcgcagcttgggcgcagactggatgatgcctgcccgatagcggacgccgccagtccagacggcatccgcgtgcatgcggtgattgccccattggtgccacaaggtgccgcaatctccatacggttccctgacaggaccatggcatcgttgcgacatctgagccaattaggtgtattcccggctgcttggctgccgatgttcgtgggactggtgcgcagacatgccacagtgctgattaccggcggaacaggcgtgggcaagaccaccttgctcaaggcgctgctggcgcaatgcgatgtgaacgagcgcatcgtcaccgtagaggaagttcgtgaactgggagaactggggcgtggcgatcatgtgtcgttggtaacgcgcgaggcgaatgtggagggcgtcggagccataagtctgacggacttggtcaaagcgacgttgcgaatgcgccccgaccgcgtggtgctgggcgaatgccgtggcgcggaaatcgtcgacctattgcgcgcgttcaattctggtcatcacggtggcatgaccactgtgcatgcggacggcgtgaaccgagtaccgtccaggctgatttcgcttggattactcgccggagtcagtccacaggcgttggccatgctggcggcaggcgctttcgacgcggtggtgcatttggagcgagtgaacggacagcggcgtatcacgcagatcggcgaactgcgtgtagcacatggtgaactggcaggaacaccgctggcggtatggaatggctgccatcctcctcggtatgccgccgaatgggggcacttcattgaacgatggggcatcgttcccgggccgagtggtggtgggtgatgatgtggtgtgctgttctggtggcgctcgccgtgctgatatggccggggaacaagtccgggaggctgtatcggctggcttaccgcgggcgtgcggtcgattccgcagccataaacgaacctcgatatgccggctcacctcgcgtgggcgttgcgcaggtgattacgtccgccatcgcgcgattgcgaggtggcggcacattggttgaagcattcgaggaacaatccagcagacgcttcgccactcagcgcattactgtggaacggctcataacggtgttcgaacagcggcgtctgcccgacgaatcaccagcgcaggtacttgaagctgcacgcggggtcaccgccgcagcggttttgagcgatgagctcggttgccaagcagtgccatgtctggaagcggtattgactgcttaccggcagatgaggctgatgcagaacctgcgatcgcaagcatgtgccgttcctaaagccactgtggggctgctgagcgcgcttccggccgtcactgtggcattgggcgagcttctgggagctagaccattggcgttcttgcttggatcgccacgcggtgtggtctgcttggtattagggggatgttgttatgctgccggcttggcatggatgcgggcattgttgaaaggcagcggattatgagtacggtgtgggtacacgccgcggcaggctgtgcggcgatcgctagttggctgtataaggctccgtcttgtcatgacagccgcttgccgggcgaggaaccggccgtagcgcatgattgcgggtcgtcatggaccatactcatattgcgtatgtcgcaggtgtccttgcgtcagggctcctcgattccccgggcgcttgacatggtgggcaaagccgtcggcggcgactgcggcgctcgcatgagcgaggtcgggagatccctgaccagaggggttccctgggctgatgcgtggcatgccgctatggctgttcagcatgagggtgcgccagctgatagttcatccggaaaacgtaccagcagaacgcaacgagatcttggcctgctgcaatcggctttggaatcgtcatggacgcatggcgatatgcctggcgtgcgcctcgaatccgccattgaacagctggaccgtgacgagcgtgccgccatcgaacggaatgccgcgaagctgtcggtaaagctactgatgcctacagggctatgttttctgccggcattcgtgctggtaggagtcattccggcgattgcgtccttcatgatgtgaatataggcgtgaactgagtgcgcttagggtgaatcttgttgtatcgctcggtattgcacttggctgcgtttggttatccacattggtggtggacgacacgtcggggtgtggataactcggcaagctagaaccacataccccgtttttcctggtgcatgaagcgttgatagtccacagtggtatgcaccccgcgtcaacccggcgcgggggccaaccactcacacacgcatggggaaggtgcgaagccactgcgcagcttcccctccttaccgaaaggaacgccaatgaatacccctatccccgtcatcgtcgacgggcaggccggcatctttgcgcacagcaaggctcgtgtggccacgctgaacgccaaggcgaaagaacggctatgcctcatggacgcacgcatccgcaccctcatggctgagcccgaagaaggcgcggccactgcggaatacgcagtcgtactcgttgcggctacaggctttgcggcggtgctggtcgccatcctgaagtcggatgccatcaagacgttgctgaccaacatcatcaaacaggctctgaaagtcgggtgacagccatgaagaccatgacatgccggtggcggcttgccagactgccgccagacctatgcacggggtcggccaccgccgaattcgcgatcgtattgcccagcgttatcgccatcgccgggctgatattggcaataggacgtgtggtcatcgtttccatggactgtcaaagtgccgcggcagcggctgcacgcgagtttgtggttaccggtgacgaatcatcctcgcgcagcatagctgcggacgttgccgggggagagcctcgcgtcatcattgcccacgacggccaatcgacgagtgtgatggtcgaatgttcggtattgcctggtccgctggatgtcactccaacgcgggttaccggcaacgctacggcgataagccaataactggtcggctggctgggcggccgcaacagaaaggaactgcggtgcagggaatgcgttatgaggagggatcgggcacgatggccggagccatgctggttatggtggtgggcattgcgctcgcggtggcggcaagtgtgggcaacctcatgatctgccagaaccgagcgcgttccctcgccgaccttatcgcctttgacgccgcgtatgcgctgtggcatgcggatatcggtgatccatgtgcgctcgccgccaacatggctgaagcgaatggtgtagttttgggctcctgctccgtgcgggatgaagacgtgttggtaaccatcaaggtggaaaccatggtcctggtggcatcatccgtggagcggatggctcgggccggaccggtgagttgtacggaaggagacaattatcacaataatggaccgtaaagcaccgatactctggcgggcttctgggcctttggctaaggtgagagcatgagcgagagtgaacgcaacgagcgccgtcgcgtggtggccatggtgggcaaccccacttccgataaaggccgtggcgctaaggtggacgcgcaggtattgggtctgctggaggaagccggccgtgcccataacttcgacgtcatcgacatcaccggcacgagtttcgacgattccctgaaccaggcgcgtgaacgcgcgcacgagtacgactatctcgtagtggtcggtggcgacggcatgatcgcacttggagcgaacgccgtgggctgcagtggcaagccgttgggcatcgtggccacggggtcgggcaacgatttcgcacgaggactgaagctgccggtcaaccgtatcgaaaccgcagtggaaggtatcgtcggtgctatcgtgcgcggatcacacatcgatgtggacatgggacgcgtgacctctttggacggcggctatgccgtggatccctccactggcgaggagtacgagtaccaggagagcaagtccgccgagcatccgattgaccggtactatgcgggcatgctgtcctgtggtcttgacgcgagcatcaacgaccgtgcgaatcattcgcatctgccgaccggcaccatgcgctactttgcggcggtgctggtggagctgacgcatatgaagcgttatggttaccacatcaaagccacattggcggacgggaccacggatgaacgagacatcatcacaccattgctgacgattgcgaattcgaggcatatcggtggcggcattgaggtctcgccgtactcctgcttctccgatggattgttggacctggtgtggatggaccacgtgccgaacttcggcgaatgcgcggtggccatttcgaatgcctataacggcaagctacttgcttcaaaggtgttcggctggaaacgtatccgtgaaatcgaagtcacgcgggcaacggaaggagacgagccgccggtgctgatggcggacggcgaatatatcgggcatttgccatttagggtagtggccgaggactgcgcgttgcgcgtgctagtgccgccggccgtagccgcccgtgaggtggattcccgacaggaagtgctcaacgccattgcccgagatggtcgcgatcccgtgaccggccagttcgcgtgacccgattatattggctcccctcattaggctgagccgtaaagcaaacagcccagtgggctgtttgtaggcgagggttcgacgatagtcgaaccagaagaaagtcagccgtaggctgtccgcaattgcggacgagctggccgcgaagcggactgaggggagtgcgggagagcggtaccagagccaatggccgtcagacctcagacgacatagctttcgatatgcagcgtctgcgccatgacctctttgatggttcggtcgctgatgttcggatgcgagcgaatcagcgagataagccccacaatcagtgtgaagaacgtctcatggacgttggtgattggcaggccatgcatctgctcgaaatcacgtacggtggtctgggcaatgtagtcggcaatacggtccgccgcgcggtcaatgaacttgatatacagttcggcgttgccgtcttggatcatacggtttgagaaggggctctcgtcggcgatcagggagcggagcacatgcacgatgtcgtctaatgccttgttcacgttgcctgtttcgcgcgcttggttccactgcttcaacgtggtgaggatttcgtcgatgacgttatcgagtactgcgtcagctacggcttccttgtcttcgaagtagtggtagaacagcgaacgcgtcataccgacttcgcttgcgatgtcggaaacggtgattttggagaagcctttttccagacacaccttgcgcgcggcttgcacgatggcgtcgcgccgggcatcgccgcgggtggggcgtttctcgtcgagggtatcgctcatgggtgcctcctgaccacaaccgttattgacactatgttaatacaaagaaagcggttaataacaataaaaatgcggtaaccgttgtcaggtgaatgtcgttggaatataaagagttttccgattcggcaactatgagcccggtttatcttgactttttatcggttaattctgagggcaaaggtaggttagtagctatggcacttgcactgtatcgtcgctatcgtccggacaccttcgaaggggtcatcggccaggaccaagtcacggtcccgctgatgcgcgccttggacgagggcaagctcacacatgcctatctgttctcagggccgcgaggctgcggcaaaaccagctccgcgcgtatcctggcccgttgcgtcaactgtgccaaagggccgacttcccacccctgcggcgaatgcgaaagctgcaaggacctggccaccggcggtccgggttccatcgacgtggtcgaaatcgatgcggcctcgcacaacggtgtggatgatgctcgagaattgcgagaacgcgctggtttcgcccctgcgcgcgaccgctataagattttcattctcgatgaggcccacatggtcacgcagcagggcttcaatgcgctgcttaaaatcgttgaagagccgcctgaacatgtgatgttcatcttcgccaccaccgaaccagacaaggtgatcggcaccatccgttcgcgcacccaccactatccgttccgtctggtgccgcaggaagtcatgggtccctacctggagacgatctgcgacaaggaaggcatcaagcccgagcccggtgtgctgaaactggcgatgcgcgccggtggcggctccatgcgagataccctgtccgtgcttgaccagctgatggttggttcggtcgaaggcgttatcacccatgatgccgctgtagccctgctcggcttcacgccggaggcactgatcggtgaggccgtggatgcggtaatcgatcacaacggcgaagccctgtacggcgttatccagaaagtcgtggtcggcggattcgatccgagacgattcgtcgaagacctactggctcgtgtgcgtgatctgctggtgcttacgttggccggggaccgtgcggaatccgtgctgtccgacacggctgaggccgaggatatggacgatctgcaccgccaagccaaggcgctgggactgggcgcactgaccgcaatggcagacatcatcaacactacgttgggtgccatgaccggagccatttctccgcgtatgcgcttggaactgctggccgcgcgattgttggccggcagtgaatcaggctttgcaacagccgctcccgcgccagcttcttctggtatgccgcctgcggctgcttcttcgacttcgactacgccagccgcttccggtatgggtgccagtggttttgccggcgcatcgcgaggcgggtttgccggagcctcacatggcggattctccggtgctgcacgcaaccagcaagcagccgcgcctcagagcaccgcttcccatgaatctgttggaggcaatggccctgtcaacggcccggtcagcgaccgacccgcgggctctctgtctgtgcaacctgctgtagcaactgctgctgccggtgccgctcctgccgccaatgccgggtggggcgcgcccgccgcgtcgccggccgtcccggctcaaccggtgacctcgcctgcggcatcggataatcggtccatcgacgagaagtgggatgcagccgtcgccgctttgccggaaaccattcgtgaatatgtgtcacgagacaaggtgccgaccgtaaaattcggtcccaaccgtaagggtctgccttgcctgtcgatgacgttcgacaagtcgctgagccagcacgctttcgccttggccgtggataacagcggtaagaaggcggcggtcgtggtgatggatgccgtgcgcaacgagttcggtgccaatgcggttattgcaccttctgcggtcgcggcgaatggcgagcgagtcgaatccgtcaaacgtatgagcccggagcaattggccaaggtcaagcagcagattgccatggccaaggctggattggccgcgtcgagtttgggcgcgggcctgggcattcatatggggagcgagccgaaagctccgaagccgactgcaacaggccgagccgaggatacggacgacagccatcgagccggccaatccagtgcatccacggcggcgaagaactggagtgacgatgacccttgggccaagccggccgtaagcaacgcttcgccgcaatctgcagacgggttcgcacctaacgagcccgctgctacgcctgcgcccgaagagcatcacaagaagcatgttgcggttccggacatcagtgacggtgttgatccgtgggccgctccggctgctcctgttgcacccactgcgtccgttgcgtccgctggacccactggacagtccactgggcagccagccaccgcatcttccgctacggcagttgccggcgcgagcgacgatccatggaatcagacgcagtctcaggccgcggtctcaccggcgtcgcaaccggccgaagccgacccgtggaaccagccatatcagcagtctcctcacgatgatccgtggaatcagccgcaggggaaccatgctcaggcggctccgcagccaggagacgacccgtggaatcagcctcagtcccagactccggcttcttcggttcctcagacagtgtcgggcaatatgtcgggcaatgacccgtggaaccagccccaatcggttccgcagccggctgccggcgatgacccgtggaatcaaccgcaggcagttccacaatcggctccgcaggccaccccgcacggtgacccgtggaatcaaccgcaacccgcacagccgaccccgaatgccgacccgtggaatagccagccccagccccagccgaaaccacaaccgcaagtcgcggccgaggatgacgaatactcgatgagcgaccagtcgctcggcgaggcgacggccatgaatctcgacgatctgaaaaagctattcgaggtcaaaaaagtcgagcaattcgcggcagatgatccgaagaaccccaagaacatccagcctgccaagaagcactcggatgaataatgaggacgaataacgaggaatacccatggcacttgcttatgacggcgcaatacaacgactgatcgacgctttcgggcggctgcccggcatcgggccgaagggcgcgcagcgtatcgccttctacatgctgtccgcgcccgaagatgaagcgcgcgatttggccgaggccatcgaagaggtcaaggccaagatccgcttctgtgatatttgcggcaacgtgtgcgaatccagcccctgcccggtatgcgccgacccgagacgcgaccgttcggtgatctgcgtggtcgaagagcccaaggatgtgatgagcatcgagcgcacgcgcgaataccacggcctataccatgtgctcggcggcgcaatcaacccaatggccaacgttggccctgccgacctgcgtattcccggtctgctcaaacgcttagaaggcgatgaggtcaaggaagtgattatggcgctcgacccgaatattgaaggcgaggccaccaccagctacttgacccagctattgcgacccgtaggtgtcaaggtcacccgacttgccagcggcctgccggtgggctccgacttggagtatgccgacgaaatcacgctgggcagggcactggccggtcggcgcgaggcctaagccagcgtatcattggcgctttcgcccttgcggcgcatccacggccagaatgcgccgtggcggatgatgcgcgcggccttgtggcgtcgtgccaaccagataatgaacagtcctgccgccagtatgcctagaccaacaccaagggcgatattgcgcgcgtcaagcacgtcattcggctcgggggccggcatcggaatcgccacgcggtgcccggagataagcagtcggtgcgtgttcacgccgtatggcgtacaggtcatcaaagtgacgcgatcctcacccggcacgatcttgagcttcgacgtgtcatccggcaaaatcaccgaaatgcggtccactttgtagcccaaagtttcgcccatgacttcgatgtagaagaagtcgccctctttcacctcgtccaaacgggtgaacatcagcgcttcaaccaacccgcggtgcccggtaatgaccgaatgggtggatttacctcccaccggcagcgacgtgccgtacaagtggccggcaccagaagccagtgcttcctcggaagtgccgtgataaaacggcagattgatggactgcttgggcaccttgattgtgcccatcacgccgttgccggtattaagcagtgactggtattccttgtctttctttgaggcggaatcctcgccgctggcttgggatcctccttgagcggcggcgaacggatcgacggcttcacccaagataggctggccggattcagcgagcttcttgttgtatgcgcgggccgccgtgagcttgtcttccgcctgcgggtaaggccagccagctacttctttggccgtggtggctgtggtggcggccaagttgcggtcggactcgaattgcaacgctagcgggaagcaggccacggcgattgcggcgatcagcagcacaatggtgatgatgcgcatcgcccacaggttgcgttgcaggcgtcggcgctcggccacgagatcgctgatatcgatgacttcgtcaaatggtgttggaacgaatgctgcgggctcgggccgcgctgaggaaacgttgtcatttgcagatgcgtcatccggcatggccgcgttgttttcccacattttctgtgaggcacgcttactcgtcgaacgtcgatgcagcaatgccatagtcgcctgttccttcgcttgatctgctcatgatttgcttatacaagacggccgggtccgtcttagtcgtgcatggcataggtgctgtcgcaaatggcaacaccgcacgcgccacactgcgaaacgttactccgcaccaagcctttcatgcaacatgccgacggggccatataggggcaatgtagggggcataagaagtctgaaaatgcgatacgaacaacgttgctgcggctgtcagtgatgcggcttacttcggacaagccgttgagatgcaaggggatgcaaaggattgcaaagtatggcaacatgataagtcgcagcgtcggcgatatttggcagagctttcaaataggggggtatgaatgcataaagagggaatatgttacctcgataaaagaggcgctattgctgttttcgtggatgtcggttcgtcgtcgagccgttggtttcgtaggcgtgaggggcgttcccgcgtattctgttttccgaccaaagaaatgaatcacgaagaacgcctgagcaaaagctcattcgccggattgccgaacgtcaaaggcgcggttgcagaggatgcgcggatcacggattcgccgctgcgttccgaattggctagtgtgatcagagaaaagatggcactgtctgggcatctctctttttaggtcaaggaaaagggtctggcgataggcggtgatgacgcccatcgtgttggtggcactgttgctgcaaaaaggaaaagtctagttcgtaatctagtgtccaacttccctaataggaatggtccaacttccacaacgaaaatagtccaacttccacaattagaatggtccaacttccgcaatagagtgatttataggttgatgtttcgacggtttgcgggagggcacatatggcagtggagagctcggagattcaacgtggcgagtaccttcctcgagtggctgatgggttgctgactcaggcattgcagtcttctggtgccgttcagattaaaggtccaaaatggtgtggcaagactgcaacggcagaaaggcagtcggcgagtcaggtcttcatgcaggacccggatcgcagtgctacgctgttggccttggctgatacaaagccttctctcatcctgcgaggtgaggagccgagactcattgatgaatggcggatggccccgcaattgtgggacgcggtgcgtttcgccatcgatcgagggcgcggtcgtggccgattcatcctaactggatcggcgactcctcaacaggaaccagctcattccggagtgggaagaattgcccgattaaccatgcgtaccatgtccttatttgaatcgcaggaatcgacgggcgttgtttcgttgggagagttgttcgatggcaaccatgatgtttcgggtttctccgatttcgatattgaaaacaccgcgtttgcgctatgccgcggtggctggcctgaagcagtagtcgaatctcgagtaaatgttgccttgcgcatggccgcggattatgtcgaagaactacttgattctgacatcaatcgtatggatggcataaagcgcaataaaacttggatgcgtctgattatgcgctcgtatgcgcgcaatatttcttctcaggcgtcgcaatccactatcgcggcggatatgcagggtgaaccgccttcggaaggtacactctccgattatttagatgcattgtcgcgagcttgcgtgactgaagatcttccagcttggaaccctcgtttacgttctaagactgcagtgagaacgagcccaaccagacacttcagcgacccgtcgatagcttgtgcggtactgcacgcgaccccggagaaactccttaatgatttcgagacctttggcttgctgtttgagtccatgtgtattcgcgatctgcgtgtgtatgctgatgcgcttggcggagatgtgttccattatcgggataagacgggattggaatctgatgcggtcattggcctgcatgatggacgatgggctctcattgaggtcaagctcggagaaaagcaggttgatattgcggcggcccatttgaaaaagttggctgacagaattgatcaagatcacgaaggccgtccgtcattcttgatggtgctgaccgctacggctgccgcttatcgccgggacgatggggtattggtagtgccgttggccacgcttgctccgtgaactcgtatcgtgcgtttgacgcatcgttcccaacacaaaaggaaaaggcccgggctgcgggaccgggccttgaaaaggagagaggaagaagaaggtattcagttatggggtctgcggaaacctcgccggtttgctttcgtttgccggtaattgatagttaaccgctcgaatctcaaaggatggatgcggccgcctcaaagaatcgccggtgaaaacttgaatatttgctgaacaacgtaggccatgcccgtgtccacatgtcggcgcggggtcgcggggtaaacgcggcaacctttataatcgttgcgtttgcgtagaatatcgagcaaactccccctaagagaagaacaaaggacagcagtggctctcatcgtgcagaagtacggcggttcgtcggtcgccgataccgaatcgatcaaacgtgtggccaagcgcgttgttgagacggaaaagaagggcaacaaggtggccgtggtggtctccgccatgggcgacaccaccgatgaccttatcgatcaggcgctgagcatcgactccaacccgcccgagcgcgagatggacatgctgatgaccgcaggcgagcgaatttccatgagcctgctggccatggccattcacgccgaaggcagccgtgcccactccttcaccggtcagcaggccggcttcttcaccgacgcccgttacggcgcggcccacatcaaggccgtgagaccggaccgcgtgaagaacgcgctctcattgggagacatcgccatcgttgccggcttccagggcatcaacgccaagggtgacgccaccacgctcggccgcggtggttcggatacctccgcagtggcgcttgccgtggcgctcggtgccgatatctgcgagatctacactgacgtggacggcatcttcaccgccgacccgcgtatcgtgccttccgcccgccgcattccgtccatcgattacgagtccattctggagatggcgtcctgcggctccaaggtgctggcactgcgctgtgtggaatacgctcagcgtttcaacatgccgctgcacgtgcgttcctcgttctcccgtcgccccggcacattggtggtgcccgacggcattgacccgcgtacgctgccgaacctcgactgagcgcggctacagcgaacgataatcgtaagtaatttcaagcaagacaaggcaagacatgactgaagaagaagcgaaatccatgggcgacctgttccctgacctgggccccgaggcaccggtgatttccggcattgcccacgatcgttccgaggcgctggccaccgtgcgtggcgtgccgaacgagccgggtatggccgccaaggtgttcaccgagctggccaccgccggcgtgaacgtggacatgatcgtgcaggccggcgcatccgtcggcactgcggacatctccttcaccgtgcccgaatcggccgtcaagcaggttcagaacacactgctcgacaagcaggaagtgctgggctaccactccttcgatgtggacaccaacgtaggcaaggtggccgtggtgggcgttggcatgaagacccatgccggtctggccgccaagttcttccaggccctgagcgatgagggcatcaacgtgctgatgatttctacctccgagattcgtatcgccgcgctcgtgccgctcgatcagctcaacgacgccgtcaaggcgctgcacaccgcatacggtctcgatgccgatcaaatcgaagccgtggtgtacggcggtactggccgctgagccactgagccgcgtttttgcggtatatacgacgaaagccctccttgcggagggctttctcagtttcggactcagtttcaactacttcttggtgatgtagccgagagccttgagcatttcggcgcattcaagggcaccgccggctgcaccacgcagggtgttgtgggccagacccacgaacttccaatcgaagatggaatcctcacgcagacggccgatggaaacgcccatgccaccctcgtagtccacgtcgagcttgacctgcgggcggtcatcctcggtgaggtactggatgaagtgcttcggtgcgtgcggcagctccagctcggaagccttggacgtgtagttcaccagacggtcgatgagctcttccttggtggccttcttgccgaagttcaggaacacggtggcggtgtggccgttgagcacgggcacgcggatgcactgggaagtgatcttgaggtcgccgtcgaacggcacgatctcgcccttctcggcgtccacatggccgaacaccttgagcggttccttctcggacttcgcttcctcaccggagatgaacgggatgatgttgcccaccatctcgggccaatccttgaaggtcttgcctgcgccggaaatcgcctgataggtgctcacaaccacctcgcgcggctcgaattccttccacgcggccagcgccggcgtgtaggcctgaatcgagcagttcggcttgacggcgataaaaccacgagtggtgcccaggcgcttgcgctggtgctcgatcacctcgaagtgctccgggttgatctccggcaccaccatcggcacgtccggagtccagcggtgggcgctgttgttggagaccaccggggtctcggtcttggcataacgctcttcaatggcgcgaatctggtccttcggcatgtttaccgcagagaacatgaaatcaacgccagaagccacggactcggcatcgtcgccatcgacgaccaccatgttcttgacatattcgggcatcggggtttccatcttccaacggtcgccgacagcctcggcatacgtcttgccggcgctgtgcgcggaagcggcaagcgtgaccacctcgaaccacgggtgattctcaagcagcgtgataaaacgctgaccgaccataccggtggcaccaaggatgccgaccttcaatttttcggacatgatgacctctatgacctctgggtttcgatggattacttacgtcggacggccgtcatgcgggtggccgtaaaacaatgcaattgtacgaaacacgcggaacaacggcagtggtcttcccagatggtggctgcccaatgaagcgaaggcgatgttctacactggtagccatgtctatcgcatcagtagaggcccaaaaacagctcgaccgtatcgtggctctcggctacccggatgtggcggatatttccgccgccgcattccgctcgctggcccgacctctgatcggggcgctcgagcattccgatttgggatcgaacatcctgctggtgcccacgcgtgaactggtttcgcctgagtcgctgattgcacgaacctccatcaatcgcatggcaggcttcaccaccatgccgccgcgtgacatcgccagcttcctgcctcaagacggcttcatgccgccggaaggcccgttctatctggtcgtcaatccgcacaccggcacgtgctatgtcaatcgcgagccggatgtggcccgcaaacttattgactccgatgagcgcctgccgctcaccctcgaggaaggcttggccatcgccacccagcacccggagtggctgctggaaaagaacggcttcaatctgctcggctcacgctccgcagacggacgcgtgccgagcatctggatgagccagaacgcaccgcgactgggagccgtctggcccaattcccgccatacttggctgggcaacgcgtattgcacggcccgtcgcggggtgagcctgtttaagtaggtttagcgcgcggccttgatcagcgaacggatgatggctataaagccaaggctcatcgcgccggccaccacggcgaacacctgcgggcggcgcagctcgttgcgtgcgctgaccgctccggtaacgcaatgatcctcgaaccagacgcgcagctcgttgctggagtagcggccgaccagattaccccatgtgagcatgcgggtcacatagcccgccggattgctctcatggaattcaaacaggcgaatgccgcggtaccgcgacttgggaccatagcattcgaacccgcacgtgggtgcatagcccagatcgatatcatgcacatgaccaacgaaagagttcttatggtcatgcccgcagaacagcgcgaaatagccgccagcctcgcgcaaggcatccacctcgcccacattctcgtccgcgcagccgatcgcctcgccgagccgcgagccggggcggcagacctcatggttgagcacatagcaacgcccggcgtgcgtgcgcgcgccttccacggcgttcggcgtccatgcgggcacttccttcagacaatcgtagaattcctgcggcggaatgtgctggaaggcgatggccggcacgggcttgccgtcgccattgcgctcgcccaactcggtttggacggaccccagccattcgatggccttgggggtgggggtgccgtacccgtcggcgtcggccaggtcgagtcctcgcggattgaccacatacgccgggtattgggcgtcgttttcttcgggtttgccggcataatcgcctgaattgaccatcataacggacatggccacgcggccggaaccatcggaggactcgacgggcagcgcgaacgtgccgggctcgagactgtcgtcggggttcaggcagccggggtattcgcggtagatgtcatcctgttcgtcggccagaatgccgcattggaagtcgtggttgccgtaggtggcggcaaagggcacgccggcctcgacgaccggaccaaggaaaccggagaacgtgcggcggaccttttcgcgggtctcaatcatgagttcgtcgagggtcgccggcgtctcgtgtgcggggctggccttgccggattgcgttgaatatacgagggtggaaaccgtctcgggcgtggggctggtctcaacggaatcgcctacttcggaagtcgtgatcacgtcggtcgaatcggcgccggcagcggcgacggcgttcgtcacggtatcggggtcaagcagcgcggctggtacaggcttgccggcttcggtgagacgatcggccacgcgatcggatgttttgcgaattacggggtgacgcttgatcccgcggattttggcctcgatctcggtgaccgcgcgcacgcgagcgcccggctcttcgccgcggcggcgcaggaacgtgtcgatgtaggcgggatcatagccgcggatctggtcgccggtgaacaccacaagatccggatcggcttcgcggatggcctcgcggatgaggcggatggtgtcgggcaacacatcggggccgtcctgtacgtcggccatttgcagcacgcggaagctgccgtcttcgcggaatcgcaagctcgtcatagctcttcagtctatgttgccgggcggcggatcgcccgcgcgttcacaggactggcacagcaagggacggggcagggcggggtgccgcagccgtgttgttgcttgatggtgccgcgattttgtcatgcagcgtcggtggagatccagacagcgtccctatgctgacgttctgagaccattggcgtcgttactgattcatagaatggcccggcgccgacgctcaaagaggctagcgtcggcggtgggccaatatttgtcgcgttgccgatggttgtgggcctcgtagcgtcggtagtgtgccatagcctggcaatttgccgacgataagctttcccagagtcggtatttcgccataagttggtccgctgacgacgctgagccgtttggctgtcggtgcagtaccaatatttggcccgccgccgacgtatggagggccatctggtggggtatcgcaggcggggtgttgtgccggagtcaaagcgtggcccggcgccgacgctgagtgccctcatgtcagccaggtgcataagcaaatgccacgatacggcatttcccgcgggtttgcccgaaccggcctgtaggatgttacgtgcgtattgacaaatccgcgtggcccggcgccgccctggcacaacgccgcagtcgcgtccgcaagagggcccgcgcaataaccagtaaaggaggaacaatgggtcagggtcaatcatccgtttttgatctcgcggcagtggctgcggcgtccaatggggggaacaacgacccgctgctgcctccggcgcgattcatcggcgatccgcagaagccgagtcgtatgccgtacaacaagtacgccgcctacgacaagcagatcccgtttgattacccggagcgtacgtggccgggcaagcgactgcagcgcgcgccgcgctggtgctccgtcgatcttcgcgacggcaatcaggccctcgtcaacccgatggattccgagcgcaagctgcgtttctggaacctgctcgtctccatgggattcaaggagatcgaggtgggcttcccgtccgcttccgaaaccgatttcgacttcatccgtatgctcatcgagcgtgagctgattccggacgacgtgaccatcgtggtgctcacccagtgccgcgagcacctcatccgccgcacttacgaggcgctcaagggtgccaagcgcgccatcgtgcacttctacaactccgtgtctgtgttgcagcgcgaggtcgtgttccgcaagaacaaggaggagatcaagaagctcgccaccgacgccgccgaactgtgcaaggacctcgagaacgaggccaagggcatcgacctgtactacgagtactcgccggaatccttcaccggcaccgagccggagtacgccgtcgaggtgtgcaacgccgtgatcggtgttatcaagccgactcccgagcacccgatgatcatcaacctgcccgccaccgtggaaatgaccacgccgaacgtgttcgccgacgaagtggagtacgtctccacccacctcgacgaccgtgactccgtggtgctctccctccacccgcacaacgacgaaggcatgggcgtggccgccaccgagctggccgtgctggccggcgccgaccgcgtggaaggctgcctgctgggcaacggcgagcgtaccggcaacgtcgacttggtcacgctgggcctcaactggctcacccaaggcatcgacccgcagcttgacctgtccaacgtgcccgagattcgcaagacggttgagtactgcaaccagatcaagatttccgagcgtcacccgtacgccggcaacttcgtgttcactgcgttctccggctcgcatcaggacgccatcaagaagggtctcgaggctcgtcaggtggccgccgagcgtgctggcgccgatctcgacagcttcgtgtggcttgtgccgtacctgccgatcgacccgaaggacatcggccgcacgtacgaagccatcattcgcgtcaactcgcagtccggcaagggcggcatggcctacctgctcaagaccaaccacaatcttgacctgcccaagcgtctgcagatcgaattcgacaagatcgtgcagaactacgctgacacgaccaagaaggaagtcaaggacgaggatatctggcgtctgttcaaggacgagtacctgccggttgaacagtccggcatgaccgccgccggtgtggttgtgggcgatactcatgacgcctcgctcgtgccgtggggccgcttgaagctgctcaaggtggccgtcagctccggtgaggatggctccgacaccgtgctcaaggctcgtctgctcgaccgcggcgtgaacgtcggggtcgatgcgcccgtggagcgcgaggtctccggcatcggcaacggtccgatcgccgctttcctcaacgccatttccaactttggcgttgacgcctcgattatggattacgcggagcacaccatgtccgtcggcaccgacgccatggccgcctcgtacgtggaatgccaggtcggcgaggccgatgacgcgcagatcgtgtggggcgtcggcatcgattcgtcgattaccaccagcgccctgaagtcgattatctccgccatcaaccgttcccagcgcaagcgctgagcgctagcagagcaaaaacaaggctccctctgattgcatcagagggagccttgttgtctgtgttttacttactactgggtgacgccgttggtgccggtgttcccgccggtgcctccggaattaccattatcgttgccggtattgttcccgttgtcaccgccggtattgttgccggcgttgccatctccgccggtagtggtgccgggataattcgggcactcggtggaatagctcggattggcgaggcactgctgggcgaactcctgagcctgctgttgcttcttggcttcctcttcggccgccttctgctgtgcgtcctgctcagcctgcttctgcgcgtcttcggtggactgcttgttggtgttgttggacaggccgctgctctgtcccttgcccaagccccaagtgccgtcggagccgccgatcttgccgttgtctttagcggtcgggaactgctccgcctcggtgccttgcaaggcctgagccatgaactcctggaacaggtgggcggggtatccagtggaagagacgccgtatccggagaaggctggcaccacttgcggattgcccttatcgtccggattccagatagcccacacattcatcatgctgggggtgtatcccacgaacgacgaagccatttcgtcgttggcggtaccggacttgccggcgacgggccggcccaacatgctggatgtgccggccgccgtaccgtacgtggtggtgccctgcatggccttctgtaccaaagcgcagtcgttggcatcgaacaccttggtgccgttgctgggcgcgttgtacatgtccttattgttggaatcaagcactttggacaccatgtgcaaggtgttcttcacgccattgttggcgatggtcgaatggccttgcgccaaatcccacacggtcagggcgttgatgcccagcacgttgtacatggagttttcatcgatatcgccctgaatgcccgcttcatgggcgattgcggccgtgcgcttcggcgtcagatgctcattgacgttcatgaacgccgtgttcaccgagttggcggtggcctgatacagattgatgttgccccagttgttctccagagcgttgttcacctcttgatccaagccggtgaagtgctggtgggaattgccgttgaacaatgtatcgaagctgacgccggattgcgcggcccccagcaaagcgaacggtttcatagtcgaacccggttcgaatacggcctgatcggcattgttgagctgcttggacagataatctgaaccggcgtatacggacaatacttcaccggtcttcgggtccagcgctatgccgccgatttgcagggattcgggcatgtcgtccagacgggtgtcgccgatggactgcataagatcctgcttgctcttgtcgatggtggtgatgatcttgtatccgccagtatccaaatcctctttggtaaaggccttggactgcaccagctcgcggcgcaccatatccagcagataaccgttcggccccgcgtattcgttctgctgcgccaccgcggcggtctgcgggaacttggcatcagtgtgctgcttggcagtgatgtaaccatcctcctgcatgatgttcagcacacgcttgaagcgcgatttggccatatcggcgttatcggccggatcccacgtggacggtgacggaataatgccggcgatcatcgccgcctcagacagcgtcagatccttggcgtccttattgaagtatgccttggccgctgcctggataccgtaggagttgcggcccagatagatggtgttcatgtaattgcacagcacctcgtccttggattcggtctgcgcgattttgatggccatgatggcctcgcgcgccttgcccacataggatgtggtttcgcccatgtaataccgctcggcatactgctgggtgatggtggaaccaccttggcgcgtgcccttggtcacattattaatgaatgcgcgggcgatgcccttcagatcaaggcctttatccgtgtagaacgtacggttttcggacgccacaatcgcgttgccgatgtagtccggcagcccctcgcaagagatgatttcacgattctgttccgcgtaggagccgatcgcggtggtgccgtccgcgtaatacacggtggttttctcggccaacgcgaacttttcgggttgcgggacctcggtggtggtgtacaggtatgcgaatactgcgataccggccagcaagcccagtccaatcagggagaagaagatgcccagcacccatttcagtacacggtgcttgccttttcctgtgttctttttcttcctgttcggggctcgatggctattggaagccttgtggcttgcgtggcgggaacggctctcctggggcgtataggggccctcctgtgcggagtggccggctctgctttgcgcggtgcgcggttgcctcagagcggggccattgcctcccgaatgtgcacgacgagtataagaagccatggtgtccaccgtaactgttggccttgaacaatcgtttgacgtgagcgtaaccacacgcatttatgccggtaatttttccggaattcttacaattgggcacgcttcttgatgttgcatgaatattgcctgaatgcgctggttggtctgccgtgcgacccggcgcgcacgtttcgtgtcgctgcgctggtccatacgtctccatagacttatccccagcctccacgcggcgctatgtcacccaactcccccagggcaggaatgcagcaagggtaagtggcctctgacgggtgtgtggaggttttctttatgtgcggatttggctgtgagctggcactagcgtggtcccctgtccggggcgcggccgtacagtcgaacgtatgaatgacgcacagacccctagaattcgcgacccgcatgcggcggtcaatctggtcggctcaggcgcagcgcagcctgactcgtcgtcgaacgttgttgacccattggctgcgctcggcccggtctccggttcagatgcatcggcatccacatcaggctccttacgggatttcaggccgctggacatggacgatgcggatggggcatctgatatcgaccgtggcttggcccggcttgacccgcttaccgtgcgcccgcgaatctccagccgcgtactgtgcgtggtattcggtctgctcctgatcgctatcggcttcggcgtgtggtgggggtgcgtgtttaccgaaaacggacaatcgtacgacgaactggtctggaaaaacctgcacaacgatgtaccgtcctgggccaccggcgtgatgaacgccgtcgcacaatcctggctggttatcgctgtcagctgcacaattgccgcaatcggcattattacggcgctgattcgacgccgctggtggttggccgggcaaatcgccgtgttcgccgtggtctgcttggccgtcacccgtatcaagggtctgttgccgcgtccgttcatcatcaacactgaatctcctgccgctaattccgcgccttccggtcacacgatgctggccgcagcctgtgcggtgattctgctgcttaccgtgcctcgtgcggttcgagctttggcgggcgtcatcggcgtggtttgggcggtgaccgtcggtgtctccgtgatatacggacaatggcatcgcccttcggatgtggcgatgtccatcctgctggtggcgggattggccctgctcgctctggcagttacgcgcaagtccggcatggacgagccgggtcgccgcgtctcctcagtgagcgtgcaaatcgtcggcagcgtgctgattaccgggggcctgctgttgctcgcctacagcggttatgtgatctggcaggtggtgccggggctcaatgtcagcgccagctgggcggttcagggggcgaatgtcagcgctgttgtgggcattgcgggtgtggccatgctcgcattcggactgttgctggccctgcgtcagattactgcagcgcccttaagccggctgggtctgatcggcgctccgccggcaccgcccaaacggtaaaacatggggtgcgaacggccgaatttgcccggcacaacggcggaatttggcagttggacatgattcatgagtattatgacgccagaaacgtcgtgtgtttcgcgcaatacataaggagtgggtatggctaccaaactggtgattgtggagtctccgaccaaggcccacaagatcggtgactacctgggcaaggggtacaccgtcatggcgtcggtcggccatatccgagacctcgcgcagcccagccaggtgcccgcggcagacaaggccaagttcggcaagttcggcgtggacgtcaacgacgggttcaagccgtattacattgtcgacggcgacaagaagcgtacggtcagcgaactcaaatcggccctgaagaacgccgatgaactctatctggcgactgatgaggatcgcgagggcgaggccatcgcgtggcacttggtgcagaccttgaaacccgaggtgccggtcaagcgcatggtgttccacgagatcaccaagaacgccatcaacgcctccctgaacaacacgcgcgatgtggatggcaatatggtcgacgcacaggagacccgccgcatcctcgaccgtctgtacggctatgagctgtcgccggtgctgtggcgcaaggtgggcccaggcctgtccgccggccgcgtgcagtccgtggccacccgcctgatcgtggaacgcgagcgcgaacgcatggcgttcaagcgcgcaccgtactgggatatcgtcgccacgctgtccgcgcctgacgcgctgggggagcgtgccgaattctccgcccgcatgatcgcgctcggcggcaagcgactcgccggctccaaggatttcggtgccgacggccagctgaccccggacgggttcgcggcgaacgttcgccagcttgatgaggctggtgccaccgccgtggcttcggcgctgaagaccgccgatttcactgtgatgtcgatggaaaccaagccgtaccgccgccgcccgcagccgccgttcaccacctcgaccctgcagcagaccgccggcaatcgcctcggcatgggtgctcgcgccgtgatgcgcgcggcccaaagcctgtacgagaacggctacatcacctatatgcgaaccgattcggtgacgctgtcgcaggagggcatcaccgccgcccgcaacgccgtctcctaccatttcggcgacaagttcctctccgccgagcccaagcagtacgccaccaaaaccgctggcgcgcaggaagcccacgagtgtattcgcccggcgggctcgcgcttccacgacccggacgagctggcttccaaacttcccggcgaccagctgcgcctatacacgctgatctggcagcgcacgcttgcctgccagatggctgacgccaccggttccaccgccaccgtgcgcctgtctgcgccggccggccccaccgagggcgaggccgtgttccaggcgtccggcaccgtcatcgaattccccggctttatgaaggccacgggggaggggcgcaagcccaaggccgccgctcccggcgctggggctggctcggaccaggctgctgccgccggcaagacggacgccaaggccgtcaggggtgacgcctccgaatccaacacctccctgccgccgatgagcgtcggccagcaggtcgaggcaagcgacatcgaaccggacggccatgaaacccagccgccggcccgctacaccgaggccacgctggtcaagacgctggaagccaaggagatcggtcgcccgtccacttacgcgagcattatctccacaatcatggatcgcggttacgtatacgagcgtggccgtgcgctgatccccagctggctcgccttctccgtgaccaagttgctcgagacgaacttccccaagctggtcgactaccagttcaccgccgagatggaaaacggccttgaccgcatcgcccacggcgaggaatccggccgcgactggctcacccacttctacttcggttccggcgagggcgccgcccgcaacgccgacgaggcgcacgaaggcctgcaacagcaggtcgcgcagctcggcgagatcgacgcgcgcgccatcaacaccatcgacatcggcgacggcctgcacgtgcgcgtcggccgttacggcccgtatctggaagacatggagcatctggacgccgaaggcaacccgaagcgcgcgtctctgccggacaccatcgcgccggatgagctgacggtggccgtggcccgcgatttgatcgacaaccactccggtggaccgcgcgagctgggcgttgatccggtatccggcggtaccgtcgaggtgcgcaatgggcgtttcggcccgtatgtggcgttggtgccgccggctgaggcttcggctggcgctgctggcgatactgctggtgcttctgcggccaagaagggttcgaagaaggccgcggccgccgccgcgtcgcgcccgaagatggcctcgttgttcaagacgatgagccctgaatcgctgtcgctggaagacgcgctaaagctgctgagcctgccgcgcgaagtgggcacatacgaggaaaccaacgccgaaaccggcgaggtatccgaatgcacggtggccgccaacaacggtcgctacggcccctatctgaccaagacgggtgccgacggcaagtcggagacccgctcgctggcctcggaagacgagatcttcacggtcgatatcgacaaggccaaagaactgttctcgcagcccaagtacggccgcgggcgtggccgtggtgccgccaagccgccgctgcgtgatttgggcaaggacccgaacaccggcaagaacgtgaccatcaaggacggccgtttcggcgcgtacatcaccgatggcgagaccaaccgtacggtgccgcgtcagtacacgcctgaatccatcacccctgatgacgccttccgactgctcgccgaaaagcgtgcggctggtccctccacccgtggccgtcgcggtgctgggcgtgctggtagcgccaaggccgttgccggcaagggcaagaagggcggtacctcggctgcggtttcggcgcaggaggccaagcgcgccgaacgccgtgccgaagtcaagaagttggcgaacaagggctggtccaaccagcgcatcgccgaaaaactcggttccacccccgccactgtgaaaaaggacgtcgactggctgaccgccaacgagggctacgagcgccccgccgtaattcccaagcgtggctgagcggaattattgctctacttgcgtttcaaggggctgatttctcgttttgagaatatctacttccgcttcaaggggctggtcatctgctgaaccacgagtatgaacggctccgcgccaacgtcattccgccgttttggaacgttgtctacttgggcaacagcccctcgaaacggaagtagaccttcagaaaagaccaaatcagccccttgaaacggaggtagagctggtttaactgcctgttgggcgcaactctgcgcctaacgctaaggtcaatagcatgagcggtctgtttgtttcgtttgaaggtgtcgatggcgtgggcaagaccacgcaagtcgagcggctgcatgcgtatcttgaggctcaggggcgtaccgtggtcgttacccgtgagccgggaggcactgcgttaggcaaggccattcgccaactgctgttgcacggtgtggatgggggcgccgtcgacatcgcaccgcgcgccgaggcgctgctattcgctgcagaccgagcccagcacgttgccgaaaccatccgcccggcattggagcgcggtgaagtggtgatcaccgaccgctatttagactcttccttggcctatcaggccggtggccgcgaactcacgccagaagagattcgatccttaagcatgtgggccaccaacaacctgctgcccgaccgcacgtatttgctggatatggacccagccctgtcccaccatcgcctcgaacacgcggaagaccgtatggaatcggccggtgatgacttccagtcccgcacccgccaggccttcttggacttggccgccgccgagccgaatcgtttccgcgttatcgatgcgagccagagcattgaagcggtatgggctgccatcgaatccgacatcaaggaactcgcatgagcgtatgggattcactagtcggccaaaagccggtaatcgacatgctcagtcgtatcgcgcagggcgacccgagccagatcacccagtcgtggctgatctgtggacctcccggatcgggccgttccaacatggcccgagcattcgcggcggcgctggaaagcccggatcacggcatgagcgctgagcccacgcgcgtcacccagcaggtgcttgccggcacgcatccggatgtcacggtgctgaccacgaacaaggtgactattggtatcgatcaggtgcgtgagatcatcactacctccgagcagatgcccgccaccgcgccgtggcgcatcatcatcatcgaagacgtggatcgcatgcttgagcgcaccaccaacgtgctcttgaaagagattgaggagccggccgagcattgcatctggctactgtgcgcgcccagcgcccaggacgtgctgcccaccatccgctcgcgcacacgcatcgtgaacctcgccgtgccctccacccaggcggtggccggattcctgacctccaccaccaatgtcgagccaaaagtggcgcagcgtgcggcccgactcgccgaaggccatatcggcatcgccaagttgtacgccaccgacgaacgggttatgtccgaccgcgatgaacttgtggtcggtgtgctgaatctggcccgtgcctcggatgcagtgttgttggccggcaatcttatcgacaatgccaaggcccaggccgaggcggacgcgaaccgcatcaccgccggccaggaagcggaattccgccgcatcaacggactggcaccgagcgaccgcatcccgccgaaactgcgtggcgcattcaaccagattgccaagaaagacgatgtgaagcgtttggtcacccgccgtacgcgcgacgtattggatcgtgcgctgaactccatcgcttccatctaccgagatgtggcggtgctgcagaacaatgcggaggattcggtgggcctcatcaacctggagaaccgctcgtcgatcaccgaattgtcggtgcgattgaaccgggccggtgctgtgacccgtctggacgaagtggcccacgcccgcaagcgcctagccggcaacggcaacccgctactggtattcgagtccctcttctgcgccctgatctcataacccgacgcaactagcccccctctgatgagtgggggctgtcgagcgcagcgagactgggggagagaccccgtaacgcacagctcccagtacgtcacacatatgagcgatactgggacgtatgaagatttccgccgatttcaccgtcatcccggacgatttcgccaaggccgcggcccctgaatatttcaatggtggcgtgcctgtggtctccttcccgttctacatcgatgatgtggatcccgaggcccgctacctgcactgggagttcgtggacccggattcgattccggtctgcggcttcgagtggattcactggtccgtggccaatctgccgattgatgcgctgatgtacgacttcaatgattcgcatgcgttggccatcccgccggacttctcccgtcagctgccggccatgattcccgagaccgtgcaggggcgcaactcctcggcctccaagttcttgggccgcagcactgacccggcggtgatcatgcggtacaacggtccgcagccgccggacaaggatcatgagtactacctgcaggtgtgggccaccaagaagccgttgcccggcttgaatcagggcttctggctcaacgagctgttgcacgcgctgcgcaacagcggtgaagtgcccgacaccgacggcatcttcctgaccggcaaggcgtgagccacatgagcccccgcaggcgggggctgtcagcatcactgactgggggtgggtcagtacaaaaccaccttcagtccgacttcgtcgtccagctcccgccagtgggagcgtgactacaacaaagaaaggacaccatcacactatggcctgcaccacgattctggtaggcaaagacgcgagctatgacggctcgaccatcatcgcccgcaacgaggattccgcgaacggcgagttcaacccgaagcgcttcatcgtcgtgaagccggaggaacagccgcgcgaatacaagtcggtgatctcccacctaaccatcaccctgccggacgacccgctgcagtacaccgccgtgccgaacgcggacctcaaggaaggtatttggggcgaggccggcgtcaacgaggcgaacgtggcgatgagcgccaccgaaaccctgaccaccaacgagcgcgtgctcggcgccgacccgttcgtggaatacacgccggccaagggcgatgagcccgaggtgcccggcggcatcggcgaagaggacttcctgaccatcgtgctgccgtatgtcaagaccgcacgcgagggcgtccagcgcctcggcgcgctgcttgaggaattcggcacctacgagatgaacggcgtcgccttctccgactccaacgaaatctggtggctggaaactgtgggcggccatcactggattgccaagcgagtgccggacgaggcctacgtgaccatgccgaaccagctcggtatcgacgaattcgaccttgaggacgccctgggtgaccaggaagcgcacatgtgttccgaagaccttgccgaattcatcgaaaccaaccatttggacctcgcggtggagaacactaccccgttcaacccgcgcgatgccttcggctcccactccgactccgaccacgtgtacaacaccccgcgcgcctggtacatgcagcgcttcctcaacccgtacgacgaggtgtgggacggcccggacgccgaccacaagcccacctccgacgacatcccgtgggcccgtcagcctgagcgcaaggtgaccatcgaggatatcaagtacgtgctgagctcccactaccagggcaccccgttcgatccgtacggccagctgggcgatgagcgcacccgccacatgtaccgcacgatcggcatcaaccgccagagccagctcgcggtgatgcagatccgcccgtaccgcccgcaggcctcccgcgccatccagtggatggcatacggctccaacccgttcaacacgctggtaccgttcttcccgaacgtggacaccacgcccgcctaccttgaggacaccaccacccgcgtgacgtccgagaacttctactgggccaaccgcatcatcgccgccctgtgcgatggcgccttccgctccacgtccaacgccgttgagcgctaccaggagaagaccggtgcgatgggccaccgcttggtcgccgccaccgacgagcagatcgcccgtctgggcttgacggccgccgaggaagccgcgcagtccgccgctgaagaggaatttgaggccgacaacgtggatggcgatgtgcagccgatgaccccggacgagaccatcgccgcgctgcgtaaccccgaggtgcgcgagattctcgccgccgccaaccagaccatggccgaccagctcaaggaggaaaccgaaaagctgcttgactccgtgctgtacactcgcagcatggaaatgaagaacggcttccacatgtccgacttttagtccgtattgagctcccctccctgaggggctgagccgttaagaaaacagcccagtgggctgtttttaggcgaagaggcggcgactgccgccccaccaccccgccccaccacacaaacacagaaaggctttatatgaccaccatcgaagacttcaccagccagtacggtctggtccagaagatcgacgcattcggctacatgaagtacctggccgagaaccctgacgccccgcgcaagcacggcaaggtggtgctcgtcaccgccgatacgccgctcaaggcatcgcgcggagaaggcaagaccaccacgaccatcgccctgatcgacgccctgaacaagcgcggcattgatgcgaccgccgtgctgcgtcagccgagcatgggcatcaccgcagccggttccaagggcggtgcctccggcggcggcaaggcttccctgacccaccccgagctcatcgactggggtctgtgcggcgaaatgggcgccatcgaggcggcccagaacctgctcgtctccttcgccgagaaggccatcgatgacggcaagctcgacacgattctcgtgccgcgtgtctccgaggtgccgagccgctccctgcgctccaccgccgtggactacggcaagggcaacgtgccggagaaggtcgtgctcacgccgacctgcgagctcatgcagattgtggtgctctcccgctcgatggacgagatttccgagcgcgtgtccaagatgatcgccggcaccaaggacggcaaggccgtgaccttcggcgaatttgtggacctgtggcgtatcactggcattctggccgacgcggtcaagccggccaagaccgagaccgtaaacggctccccggtctacgtgcacggtggcccgttcgccaacgtgtccatcggcattccgacgctggtctccgtggaaatggcctgcgccctgcatgacgtggtcatcgtcgaggccggttacggcaccgacgccggcgcccagaagtggctggacatcgcctgccgcgaatacggcgcgcagtggccgtccgccgccatcgtggtgacccgtgcctccacctggcgcgacgatcccgagctggcctggcgctacccgttccacgtgcagcgcctggagaacctggacattccgaccttcccgctcatcaacctgtgggaaggcgaggacgatcaggttccgtccctgaaggccaccgccgacgagctgggcttccgcacgccgatcatcggcaacctgttccgcgacggcggcgaggcgctggccccgcagcttgacggtttcgtcgacgcgttgcagaacggctccatgccggccgaaccgcactcgcacaagggcatggccctgaccgagaacgccaagtgggtggccgagaacgcctacggcgtaccggccgagcgcgtgatttacaagccgggcttcaccgagtccgtgtccgaggccatggaactgtgccagagcgcaggcatctcgctggacgatctggcgttcgtggcggtcaagtccccggcgaccatgaccgacaacgaccgtgcccccgaagaagagcgcaccgtgaccctgaagaaggttgaggtgcatgccggtgccggtctggtccacgtcaacctgaccaccagcctcaccacccccatgcccaagatcgtgtgatgacaggcatgaggtgaggtaactcgcttttgaggggcggattttcggttttccggaggtctatctgcgtttcgaggggctcttcgattgcgaaatccggagtatgaccattgaaattgcaatgtttatactccggttttcttgttttaaaagccccttgaaacgctagtagagcttctgaatgttggaaatcagccccttgaaacgtagaaagcccgccaccggcgggctttctacatctgagcttccctctttgaggggagctgtcagcgaagctgactgaggggagccagcatacgcaaactagaagttgctaccctgagccgttaaacggaaagcccaccgggctttccgtaggcgatgcgagcagctatgctgcgaggggaatggtggcaactagaagttgccaccattccagccccagtcggtggtggcggtgtaacggatgtaggtgcggtcctcgggaatgccgagcgtggagttcagcgcggccataatgctctcggtcagcttttcccaagcagagcccggcacagagcggccgaacacgttgacttccacataggcggcgggctggtcatcgctaccaccgaagtaaatcggcatattgtcctcgaacgggcacattagccagccctcggacttgcccggcacggcggtaatcgccttgccataggcagccttcaacgcctcgcgctgctcaggggtggtgggcacggacacatgagtgtgaataacgggcataattcctccttgattcggttcgcttccagtctagcctcagcggttgctgttgaacatggcatgcggatgtaggaagctgcttgcagaacggaccggggcaaggccaatttggggagattattggcctttccagccaatatatgttccgcagtcagcccaatagtgttgaatacccttgtgagaaaactgattgaacaactgatgaagttcggcattgtgggcgtcatcgcctttgttatcgactggggtattctcaacctattggttggcatattccacatgcacaacgtgctggctgccaccgtctctttcatcatctcgctgattttcaactatctggcgagcatgaaattcgtattcaagcatcgtgatgacatggcgcgctggatggagattcttatcttcgtggcgggcgctgtagtcggtctgttcatgaatgacgcgattatctggatttccacttatggcatgaaccatgatgcctatgtatcgcagcatgccgaatatctgttgcgcaccaatatcggcaagttggtggccactgccgtggtaatgatctggaacttcttgattcgcaagtggctgctcgacgatacgcacaccaatgcgatgaaccgtctgaagtccgctgaaaatcgactgaatgccgaggagcttgaagccaagtggcagaacagcttctcccacaagctcggcatctggtccctggaacacacgcccaaaggctggccgaagtagcgttttgacgtataagccccctcgtcagagggggcttagcttttgtctcacacactcacttcagtcaaggtcggctgctcggtggagcccttgatctgcttgaagccaatcagcgcaatcaccagcgagaccagtgccaaagtggtcaccaccatgaagccgccatgcgagcccatgcggtcgatgaactggccggcaatcgccgaaccggcggaggagccgatagaattcatcgcacccatccacgccatgccttcggtcaggcgggaaggcggcaccaagtgcagcatgagctggttgccgttgatccacgtcggggcctggcatacgccaataatcaagtagatgatcatgatcacccacagatgcttggcgaacaggaacgtactgatgccgatgttcaccacggccaggcagaagtagaagcgcttccacagggcaatcgaccagttcttcgcgccatacaccaatgcgcccatcagcgagctgaaggagaagcaggcaaacacaaagcccgtgtactgcttcatattcgcttcggtggcaaacgcgatgatggagatgcccgtagccgactggaacgcgcccaaaccgaaccaggtgacgcacaccgcaatcagacccggaccccaaatggacgccttcttgcccgaacgcgcatcggcgaccgcctgcttaatggctgcgttaatcgtggcctcatcggtcacgccttcacgctcaagacggcggcgagtctcctcggctgcggtctccaccttcaacgcttcggctcgagccgcctcgcgctcacggtattccttgcgggaaatgccctcagcgcgggccagctgagtctgtgacggtggctcagtggtcagctcggtcaagaacatcagcgcgcccaccaccacgcacatgccggtgaacgagaatgccagcagaccggagatcacggccagtgtggaagccagtggattgccgattacccacatgcattcgtccagcacgccgcacagggagagcgcacggttggtacgctcctgatcgcccttcaggattttggtccagcgcgcgcggctcatcgcgccccacggcggaatagctgccaggaacggcgtcaaacagtacagcacccattccggcgcacgattggtgatggatgtggtcagcgcgacggcggcgacaatccacaccagaatcgttggaatcgaaacctgccgctggccgaacttgtcggtcagcttgccgagcagcggcgtggccacggccagtgcaatcgcctgaatggcggtgagcatacctgccagcgagtagttgccgtagtaatgctgcacggaaatggtgatggtcatgcccaccatcgggaacggcatgcaggcaatcaccgaaccgatggaataacgagcggtatgaggtatgcgcagcaactccgcatacccaccaaaaactttgtgacccacttccttgatgccggccagaatggagttcgagttggacgagttattggacataacagcactacgctcctttccgctcccgattggatgtcccccgctggtgtggcattgccggcgaagccctcatcgaatgatgtgttgtccatggtcgcgcaaagtttgcgtcggattttcccccatccgcatatttgcgtcatggatactctacgggtgtccactccgcgacacgcggtagattggagatattaagacaacgttctcatgcccttcagggcgggaagcagaaaggcgactcatgagcgctactaccatccatttcgtccggcatggcaaggtatataaccccgaccatctgctctatgagcgactgcccgacttccatctttccgaccttggccgtcgcatggctcaagccaccgccacgtacttggccaagaatccccaaaccaatacgattgcagccgtctactcctcgccgctcgaccgtacgcgcgagaccgccggcgcgattctcgatgcgctgaaccccgtgcgcgaggctcgtggcgaggctccgctcacgctcactactgatgaacgggtgattgaggccggcaacgagttccgtggcaagcgcatcggccatggcgagggcgcgctgtggaagaacggcaactggaagctcgtcaccaacctgtacaagccgagctggggcgagtcctatcagcacatcgcggcgcgtatggacgacttcgcccgcgagaaggtggcccagcaccccggcgagcagattgtggtggtcagccacgaatcgccgattttcagttatcgccattatctggagaccggccaccccgagcactggatgttcctgcggcacacggcgctcgcctccgtgacctcggtgacgtacgacaacgaaaccggccgtgtgatgtcaatcacgtatgtcgacccagcggccaacgtcaagtaacggcacactggtgttaggacattggttcccctctctgaggctgagccgtgaagcaaacagtccagtggactgtttgtaggcgaagacgagccgataggcgagctattgaggcgcgggcgtggcccgtccgcaattgctgctgagctgtcaccgtaggtgactgaggggagccaagagacgcactacaatcgagtggtggacgcaaaggagcatagatgaccattgaactcaatcgtgaggcaatcgcacaggtcgcggcattgccggcggtaactgaggccgccgaagccggctcggcgctgatcagcctgtggccgctgaccgaagccgtgcagatggacaatgacgcaaagtacgcggagaacctgcaggtgcgcgtcacccgtgcattcgcccgcatcctgaccggcgaggacgtcaccgtgccggacgccgagttcgtctacgaaggtgccgatgagattcccggtcgcccgcagagcatcgtggacgccctgctcgccgccaatgacgcctacgatacgatggccgggtattgcacatccggtgatgcgcggctggtcttcgacgccgccgcgacgctgggcgtccattggagcgactccgtcgcgcacgccgtccgcgccacgatagccgacgtggagtcgcagatcgaagccgacgccgttcagggccgcctggccgcgtccggcgagcctgaggacgtcgccgaccgtttcgccaccgcactcgccgtatgcgatgcgttgttgggtgtggtggccgaagacgccggcgccgacgcccgggctcgggcgaccgccgtgctgccgatcctgctgtacgtcaatgagttgcgcgaacagtgctcgattccgcgcatctgcctgaccgatcggcagatttcagggcttctcgatgcccgtgccgggtccggggacgacgggaccctggccgccaccgccgcgtacatcgcccctttggcccgcgacgaatgggccaagcatcgtgacgatgtgctttgggatccgggtgaggccaagaggagggccaaggaggaggacgagaagcgcaacaaggaggctttggccgccaagttcgcccacatcaaggacgatccgggcaaggaggccgtggagctgtagccggtgccgggcgtcgcgggcggcgtcgcgcgccgtcgtcttgcgattgttttgccatcgttttcgccgcggcggtatcctatggggtgaacagtatcgtccgtgcaatggaagtggaagatttatggacaacgatgtcaatctgcgcacgcttgtcaacgatggcggcagcgcggtaatcagcgattacggggcgcatctgctgcgctgggccccgacaggacagccggatgtggtatggacgccgagcacgtggcgcatcgaacctggcaagccgctcggcggcggggttccgatctgctttccgtggttcgggcccggattcgcgcatggccggcagctggcgatcacgccatcccacggattcgcaagggtgcgccggtggacgctggatgaggaggggttcaccgatgaccgggtgcggtatgtgatggattccgagtgtctgacggatggcgaagtgccgtggcttgacgacgagccagaggcgcgcttccgcgccacatacgacgtgcatgccgctgacacgctgacgatgagcctgaccgtcgtcaataccggtgatgttccgatgtcgtatgaggccgcgctgcattcctatctgcatgtgggagacgtatccgacgccggtctggtgggtctgcggggggcgacgtatctggacgccaccgagaccggtttcccgccgcgattgcaggagccggaggcggtgacgttcggcgaacggccggtggatcgcgtgtattattcggattcgtccgtgcagttgcgcgacgccgttctgggccgcgtggtgcatatcgtcaaatccggctcgccgcagaccgtggtatggaacccgggcaaggaaggggaccatatgcgttgcgccagaccgggcgaatggcgtggtttcgtggcggtggaggcggcggcatgccgcgaccgcggtgtgacgttggcgccgggggagtcgcatacgctttcccagacgttgtcggtggagacgcttgacgtgtgatgatgcacggcggcgcggcatgcggccgacgatgacggtgaggccccgttcgtctcgagcggggcctcaccgttgatgcacgtcgcttcagcgggtttcgccggagtccgggccggcgttctcgtgttcgggcggcacttggccgtattgcggggccggtgcgtattgtggagtctgcccgtattgtgggttctgcccatacgtggggacggtctggccgaagtcttgggcgggggtgccgggagccgggaatcccggggcggcggaggcaccgtacggcataccgtaggcgttttggggtgcggcgccgatcgccgcgtcgtcgtcgaaccgtgcgccttccggcttggagggcagggccatgaacacaatgccggtgaccgcgctggccagcatgatcaatccgccgatggccaacgcgccgaagccgccggttgccagagcctcatagccgtagccataaccgtaatcgtagttgtggccgatggcgccgatggcgccgtacaacgccgcgccgccgccgacgatcatgatgagcagtcccagagtcatcatgccgcagaagacggcgacccaccagccgggcttgttcgtatcgtgcaggcggcggacggcgagcgccaagccggggacgacgatggccaggttccacaggctggtgaggaagtccagcctgccgtccgtgacgtcgccgagcagggacagcagggcgttgatgatgacggcggccagcgtccaccaccagaattcactgcgggaggcgcgtcccctgaacaccgtgtatttctgccagaagcggaggaaggcttcggagaaggggcatccgtagtacggcttgttcagcggcaccgcgccggtgggggccgcgtactggttgtaggtggggggaacctggccgtaggcgggggacggctgggcatagggattggcgttcggagcggactggccgtaggactggccatactcctgctggccatagttgggttggccgtagatgggctggccgtagggttgctgctgcgccgctgacgccggagcggcgaaacgaccatgatcctgccccgcaggcgccgcggtgggggctccatattcgggcgtgcctgagtggtgttggatggggtcgccgttgggcgtgggcgtgggtggtgcgggcacgttgctgggatcggtcattgattcccctttcataagacgattgcgtccctccattctctcattgagcgggcgcggcgttcaacatccacgccgaatggtgttccgtcggcgctcttcatcattcccatgctgcaacttggccgcttgcccatccaaacgatgctgcgatgcggaacaggaaacgattgcgatcagcggaatggtgggttctcgtggtggttgcaacatctgatctaccgcaaggagtatcaggtgttgcaacgttcactagaactcgccaccccgtcgcttcgtacctaaggatagccgttccctcacattccgacgaagcgatcgaagtattggcggaaccgttcgacgactcggctcttcatcagctcgtacgcgttgctcggcgcgaagcgtgacacagggggcagcatcgacactattctggtgccgtccgtgtcgacatagccttccttgaagcagtcgatgatgaactgctcggccagtcccgtcttcaggtgctcctcgctgacaatgcgctcgaattcctcctgcttcttgcggacgatgtattccttccagtcgcgctgcacgtccgcgcctgaggacagggactcgacgaacgagtcgatgaggtcctttttgctgcgcaggtcgggcgaagacatgatggtgcggctgatgtccgcgaggatcgacttgtcctccatatgcccgtcatggtatttggctacgagttcgaggatgtagtcgatgttcacttcgatctgtttgaccagttcggcttcgaagacgacgtcgtcgttgatgatctccttgtcggcttcctcatgcgaacgccgctgttggtagagatcgatgtacaggctctggtagtcctgcaggtcgcgcaggctcagcacatcttcgttggagaaatcgtcgaaggcctgcaggatgttgcgcagccgcaggatcgagccgaacagggtgaggaaatccttctgcgcctgttctccgacgatttcctcgcccaaggggaaccgcttaagcagctgcgagaccttctcggtgtatgcagcgagatattccgcatatggtttaagcaccaccgtgcccttggcgtccttgtccccgaacagagccaaggcgtcatccacctcctgccgcagatcgcggaagcagacgatgttgccaaaggtcttcaccgagttcaggatacggttggtgcggctgaacgcctgcatcaggccatgctgcttcaggttcttgtccacccacagggtgttgagcgtcgtggcgtcgaagccggtgagcagcatgttcaccacgatggccatgtccaggtcgcggttcttgagcctgaggcacagatccttgtagtagttctcgaactggtcggaggccgtgctgaagctgctgccgaacattcggttgtaatcgcagatcgcggcgtcgaggaaatcccgcgatgactggtcaaggccagcggtctcgaagtcctcgtcatcaatgaagccctgctcgccgggatcggcctcgttcggcgcgaaactgtagatcaaggcgattttcaacggttccccaccgcgctcggcctgctggcgctggaactcggtgtaatactgcttggccatgccgatggaatcagccgcaaacagcgaattgaagccgcggacgcgtcgttccttgagcatgtagctggattgccgcttggttttctggtcgaaatggtcgagcacatacgacgcgaccgcgctcacgcgccgcggatcgctcagcgccttggctgcgtcgatgccatacacctgctcatccctgacgtcttccttacggcgcaccgtatccacgtagccgatgcggaacggcagcacgttgccgtccttgatcgcatctaccaccgtgtatgagtgcagacagtcgccgaacgcctgtccggtggtgcgcaggtcgggggagccaccggttttcgcgttcacggcgaagatgggagtaccggtgaacccgaacagatgatagttcttgaaatgcttggtgatggcggtatgcatctctccgaactggctgcgatgacattcgtcgaaaatcagcaccacatgctgcgcgtagacatagtgcttgggattgccgcggataaatgaggaaagcttctgaatcgtggtgacgatgatcttcgcgtcggggctggcgagctgatcggcaagcaccttggtgctcttgttggagttgaccgcgccctttttgaaacgttcgtattccttgatggtctggtagtcgaggtccttgcggtccacgacgaacagcaccttgtcgacgccatccatgttgctggcgagctgcgccgtcttgaaacttgtcagcgtcttgccgctgcctgtggtatgccacacgtatccacccgcctcgggcgtgccgagcttcttcggatcgtattcactgatgagaatgcggttgagaatgcgttcggtggccgcgatctggtacgggcgcatcaccagcaggtcatgctcggcggtgaacacgcaatatcgcgtcaggatattgagcaatgcatgccgggcgaggaaggttctggcgaaacccgtcaggtcggcgatgacgtggttgcgcccgtcggcccaccagctggtgaattcgaaactgtcggagctcttctgcgaacggcctgttgcgggacggccctccatttcatggatgtgcttgaagcgcgtggtgttgctgtagtacttggtgtgcgtgccgttcgagatgatgaagatctgggcgtactcatagagtcccgatccggcccagaagctgtcgcgctggtaacggttgatttggttgaacgcctccttgatcgccacgccccgtcgcttcagctcgatctgcaccaacggcaggccattgaccagaatcgtcacatcataccgggtcgggtggctgccaccctcctcctcgaactggtgaagcacctggaggcggttgctgtgaacatgcaccttgtcgatgagacgaatgttcttcgtcgtgccatcgtcacggttcagaatctggatgttgtcttcctggatcagcctggtcttgtcctcgatgcccgccgtcgaagaggcgatgaccccatggaagaaatgcgaccactcattgtcggtgaaccggacatcgttcagcttctcaagctgggtgcgcaggtttgcgataagctcggactccgtatgcgcggaaagtcgttcatagccctgggattcgaggattcgcagcagctcctcctccagatccgcttcgctctggtacgcggtctcacggccgtggtcaggctcgtattcggccaccacggtgctttccgcgccctcagccacgagcttgtacgacttgccgccatccggcagatccatatccgaccgctccgtcatcatgggctccttcttcatccgtatttatccgccatcctactcaaaggaattcggattccgcagcgcatatgggattcctgaatcctgcagctcattcccaatgcagggccgtcttgattccagagacgtatgcatcgttcgcgtcgaggaagcctcgtatctccgtggcgtagtcatcgccgtcttctatattccgcacgaggtacatgagcgcaagcagcgaggacgccacggacttctcgccgtattcgaaatcatcgaacgccgttttcatgtcacgcgtcataggcgacgggatgaccatctcccgatgccacagcctggcatgatgcgagcacagattacgcagataaaccatggcgtgcacgacctccgaggaagtccgcagattggtgcgcaatccgaccgatctgtacaattccctgagcgccttggcatccacgtgcagggaaagcatccgggaaagcgtatcgaacgggaacgtctcgacggccgcccacacaggcaccggtccgcctttgcgccggtaatgccgcatgcatacctcgttggacatcttcatccatttgtccatgttgcgcagcagattgtcacgcaacagttcgccgcgtttgctgcgcacatcctgataggattcgggatccatatacgtgtaggcgttgccgtctgacgccagcaggtatgcgattctcgaacgcagggtgagttccactttcgcggtgcctttgaggatgatgttgcgcagcttctcgtccatcgcatagggaacaaggaaatcaacgtcccgagtgcccggcctgtacctgttgtcgccggccgctgggttgacttgaaaggaacggaagtatcccgagagacggtaatagttgcagtcgaagagcacctgccgcagctctgcttcatccgtgatcaccaggcctcgctccgacatcagggcgatcatctggtcgatggtcttcgcgggcttggattccgccccgatatgagaagagccccctggtttgagcactgtgagtaggcttagggagctgctgttatctgccatgttagtcgtgtcctcacattttgaaaagtctgcggcgcgtcccaaccatgctatgcatccctatggtccggcacctgaccatacatcaactcgaccgttcccacgatgaaacgtcacacggcaagttcgtcgaatgacagcagacggtcccggtaatattcgtactgcttgcgccgggcctcgatttctgcgggcaaaccggagctgaggtcattggtgagcttgtcgaagcggtcaagaatggagacgacgtgctgctgttcttcgagtggcggcactgggatagccacgttattggcaagcatcttggagttaatatggggcacaccgctaccgcgtttcattgaatgcagttttgcctgttgtttcttcaacacatggaaaagaaatctcatgtcaatcccaggcgttgcatctagtacaaaaccgtcagagacaaatatcggttcattccaataacttgcaaacccagcatttgccccactgcgcgagatcactatgccttcgccatcatgattagactccgagtgccaataggcaggctccacaccccccagtatgactggtatattccctggaataacctgttttttcgtaatatacgtgcctttgttgataaaagccgcttctccgagttttagccattggactctctctctatcgaatgtgaggagttcgttgcgataataggcatactgcttcctccgcgcctccagctccgcctccagctccgcctccagcgagctgaacgaatccagaatccgaacgatctcctcctgcaccggcaatggaggaacgggaacgacaatttttgccaagtcatccttcttgatttccattaccttggttccatgcacatatgcgcgcttacgctgaaagaaatccagcgtttggaaatagtaagaaagatacttcgcattctgatgatgtctaacaacaattgaatggccgccagtcacaatgtccgatccacccagccaggcaactgctttacatacatcctcaagattttcgctagtggctgtcacaatcaaatcatttggatggaccttgaggagtttgtctgcgagcttcttgtctacgaacgaaatggtctgagacgtaaaagtatcgtatcgcgtataaatctgaccataatggatgcatccaatgcctttgtccgtaaaatccttcttctgcaggccattcccccggtataacttcgcaatagcacccagaggcttgcgttcaaccccattcggacaatattccgcgatcaaatcgtcaatcctgctcattgctagttccttcaattcctgaatatgcatttagataatccggccgctcacaaaacactagattccagtcgccatcattaaaagcaacctcattgaaatctttgagctgtctatagctgaccgatcttttttcaaaggtgtgttgaccatcatccgttaagatgactgcgacctgcgaactcaacggatagtacaaggttgtcaagttatcagttatgaccgtacgaactggcttatctatgccaataaacgggtgcccagatgaggtcgtcaatacaagcatgctgcaatctcgcagatattccacggctttatatagtgaggaagaacgaacaaatttctcatccttattgattcctggcagtatttgcacccacagggaaatctgctcagctatcgcttcagggtcaaatgtcagcgtttcgtcaaattcttcccgcgtttgtgtttcgcggtagagttctttcaatttttcgcttgagcctaagtccagctcacgcattgtctcaagcacgtcttctgcgcggttcttcgcatatctcaccgattccgggctgcgggaaacaatatggggaatgaaaattgaaacgaagctcaccaatcgatccaaatcgtcatcctcgagacgatcactcggtctcatgtctaatacagtgtgcaggaaccggtcaagttccccgttaagcttgtcttccgttaaggacagcgatttttcgatgtaattagggaagtaatagtctccgctttctcctgatgggcaggccgtctcatacaagcgtttctgcacgcctacgttttccacacgggcgtgtcttaccactcgattcttttctgctcgcgcgacgtatgaaatcatttctttatcatccacaaaatggcgcagaaaaaaccgaggcagatagtgctccctcttggttccgatctttccgattgtgggtatcatctgtcggtcgctcacatcagttttccagattcgcgacgatggcgtcgatctgagcacggagttcgttctctcgcgccacgatgccggagatctgccggttgagttcggcgatgtcgatcttctctcgcgtgtcttcgggctgcacgtatccgttgaccgacagcacgtaatcgttcttgcggacgtcttcaagcgaggcgacggcggagaaatgttcaacaggttcgcgtttcacataagcatccatgattgcggcgatgtcgtcgggtgaaagctggttttggttgccgacgtgtacaaaccgttccgacgcgtcgatgaacagcacgctgtcgtcgttcttcgatttcttgagcacgatgatgcaggtggcgatggaggtgccgaagaacaggttcggcggcagttgaatcactgcgtcgatgaagttgccctccagcaggtatttgcggattttctgctccttgccgccgcggtagagcacgccgggaaactcgacgatggccgcggtaccgtcggccgccagccaggagagcatgtgcatggtgaacgccagatcggccttcgacttcggcgcaagcacgccagccggggcaaatcgcggatcgttgatcagtgtggggttgtcgtcgccctcccacttggtggagtagggcgggttggacacgatcacctcgaacggttcgtcatcccaatgctgaggattgatcagcgtgtcgccgtaggcaatgttgaaatggtcataattcacatcgtgcaggaacatgttgatgcggcacaggttgtatgtggtcagattcttctcctggccgaaaaacccttgccggaccttatccttgcccagcaccttgatggattgcagcagcagggaaccggaaccgcatgccgggtcatagaccttgttcacttcgctcttgccgtgggtggcgatccgggtcagcagctcgctgacctcctgcggtgtgaagaactcgccaccggacttgccggcattcgccgcgtacatggtcatcaaatactcatacgcatcaccgaacgcatcaattgtgttgtccgcaaagctctccgtacccaagtccagatcgccaatggcattgagcaccttcaccagcttggcattgcgatccaccacggtatcgccgagcttgcggctgttcaggtccaaatcgtcgaacagaccgcgcagactggattccgagcgggagccgatggctgaaccctcgatgttcttgaacacccgctgcagcgtctcgttcaggttctcgtccgcatcggcacatctgcgcacgttggcgaacaaatcggacgggagggtgaaatagcccttttcctccaccatcgacttacgcacctgctcggccgtggcatcgtccagcttggcgtagtcgaaatccacatcgccggcctggtgctcgtactcgttcaggtatgaggtgatgtcctcggagatgaaccggtagaacaggaaccccaacacatactgtttgaaatcccagccgtccactgagccgcgcaacacattggcgatactccaaatcgccttatgcaattccgcgcgctgcgcgccgctattcgtcatgtcatgccttctttaaaatcgtaaagtataacccccaacgataccaagtgtgcaggttcacacaccggtcgcgttgtctcaatgaaagcgcgacgactccgccgaggttgcgatactggcggttcgccacggaacaccgtcgcgtccggcgcgcgcggcacaataggggattatgactgatgctgaaaacaccaaacccgaactgcccaagaacgttcgtgttcgcttctgcccgtcgccgaccggaaccccgcatgtcggcatgattcgtaccgccctgttcaactgggcggaagctcgcgccaccggcggcacgctgatcttccgtatcgaagacaccgacgccgtgcgcgactccgaagaaagctacaaccagatcctcgaatccctgcgttggctgggtatcgactgggacgagggcatcgatgtgggtggccctcacggcccgtaccgccagtccgagcgtaccgccatctacaaggatgttgccgccaagctgctcgaagccggctacgcctacgagtccttctccactcctgaggaaatcaaggagcgcaaccttgccgccggccgtccggccgagttcggctacgatggctacgaccgcaacctgaccgatgaacagaaggccgccttccgcgccgagggccgcaagcctgcgctacgtatcaagatgcctgatgaagacatcgcctttgacgatctgattcgtggcaccatcgagttcaaggccggctccgtgccggactacgtgatcgtgcgcccgaacggcgacccactgtacacgctgaccaacccggtcgacgacgcgatgatggaagtcaacgtcgtgctgcgcggcgaggacctcctgagctccaccccgcgccagatcgtgctttaccgttaccttatggaactcggcatcgccaaggagatgccgctgttcggccacatgccgtacgtgatgggccagggcaacaagaagctctccaagcgcgacccagagtccaacctgttcaaccaccgcgacaatggcttcatccgcgagggcctgctcaactacctggccctgctcggctggtccattgcaccggaccgcgacgtgttctccatggacgagatgaccgagaagttcgacgtgcgcgacgtcaaggccaacccggcccgcttcgacatcgacaaggccatctccatcaacgccgagcacatccgtatgcttgagcccgaggacttcctgcgccgctcggtgccgtacctgcaccgcgacggtgtggtttccgccgacaactgggatgccctgaccgaccgtgagcgtgaggtgctgaccgccgccgctccgctggttcagccgcgcgtgcgcctgctgggtgaggttgccggcatggtcggctccctgctctccaccgagggctacttggagccggctgacgacgccaagaagcagctgaaggattctgccggcgaggtgctggacaaggccatcgccgcactcgaggctgtggatgaggctgactggaagaccgacaacctgcatgagaccctgaacaaggctctggttgaggagggcggctacaagccgcgcctcgctttcggtccggtgcgtgtggccatgtctggtcgtcgcgtgagcccgccgctgttcgagtccatggagatcgtcggcaagccggtttccctcgctcgcctgaagggcctgcgcgagcacctgtgagctaaggttccttccgtgctcggctgagctgtaaggacactcaaggtgggcgtctgcatgtgcagatgcccaccttttcttgtattcagtgatgagctggaacagctggaaagtcttaccgctgcgccgcatgccagtgagaatatgtacgaggttgaacatggctggtttgtgcagtgaggtcacgaaacgtgccttgtaggtggtttcgccttcatgcgtccatgaaacggttgataggtaaccgggcggcggtctttgacgtgacattgcattacaagcatcgcgacgcgctcgctgtcgcaagggaacataagcgcctcatttggttcttgaaggctgatttgccggctatgaatgtgcaaggcaaagatcattgcctcatctgcaatttcatcagtgcattagatggtaattcatcagtagtgcttactgataatccgtcagtagagttcatgcaaattcatcagtagtggcagcgtagcacttgaaatcgttgaaattccgcgcgacacgccgtaagttgcgtaagggtgaatacttgcgtatatttatcactcgttgcgcggttcaccgagcagccggttgaaaaactgaatatgcccccatcgtctagcggtctaggactacgccctctcacggcgccaacaccggttcaaatccggttgggggtacgacgaacaactccttggagttgctacgccaagccaaattgggatgtggtgtaattggcaacacagctgattctggttcagccattcttggttcgagtccaggcatcccagccaatgaccctcgcggaatgcgagggttttttgttttcagggaagtagccgcttgaaaagcgacttccctgcatatgagtgcgcataagagcgctaagagcgcatacgtgtgtatgaaagtacgagaacgaaggagatcgaagtatgtccgctgggcagcaggctgtaccggcaaacaacgccaacaatgcaagcaatgaaggcgctcagaagaagcacatgtctaaggcggccgtcgccattatcgccgtggtggtcgtggccattatcgtcgtggccggtgtgttcggcttccgcgcctactccgatgctcagtacaacaatgcagtcgccgcttgcgccgccgcttccgaaaatgtgcgcaacgccactaatgactacaacaacttggtcaatggcgatgcttccgaagctgctgcgctcaccaagaaggatgtaaaggatgcctccacgctggacgccctcaacaaggaactgagcgtggaactgccggtatacgaaggctgcgtagctgacgacactgccggcttcaagtccgctactgcgaagctcaacgagcaggctgattggtacaaggcttatactcaatcgctgcagaaggctgtggatgccgtgaacgcttccaagaagtaagcgagcacagcctcaccattgtcgtcaaagccgtcttgcggttgcgcaaggcggcttttgctattttgctcaatcggcttgctgctgtaatgctgctgcattgattgcgtcgaatgcaggtaaattcgtcttactttttttgcgcagtttttccctgcgcgtgtcgcgatgatgcgaatatagatgtgaaggttaacaacgtagtcgtttattgggttttgtgatttcactcacgttgtaattcaatgtcaaatatgtggcgattctccgtatttgctgagattgctattaagaatagcttcttgtaaagtgtcttatcgtaattgcgaatgcgtattcttcaatgaagaaggcatctgcttcacctcgaagaagagattaaggagaatatagttaatgaaaaagaagaagactatatcggctgcgctggcaacagcgttagccttaacctgcatgggcagcggggggggtactgcgttcgcagtgcccctgtctgatgctgacttgcagactttggcaagtcagattcagcaaatcaacgatacttctgattctgcaactgcttccgagactccttccgcacaagccgatgcggttgaaggctggactattgattccaacatcgctcagggcggcgaaatcctggagatggcaaacggttggctgcacctcaagtccactgcctctaacggtaatgcggcagcgaaccccagctccagcagcaactggccggcagtagccgtatggggcacagattacgacttctccaaggccggctccttccacgccaccatcaaatccccgcaggaaggctccgccaaccgcttcggcttctacctgggctacaacgacccgggcagcggcctgttcatcggctacgattcggacggctggttctggcagacctacaccggtggcggtagcggcagctggtacagcggtgctcgtatcgctgctccgagcgccaacgaagagcacgacattcaggtctcctggaccgacgccaaggtcgccacactgaccgtggatggccagaaggcattcgatgtcgattactccgcaatgacgaacctctccaacaagcttgccatcaaggccggctcctggaaggggctgaaccaggtcaccgacgtgtacatcaaggacttcccggaggttgtcgaagccgccaagcacgcggtttccggcaaggttgtggacgctggaggcgctgccattgaaggcgcaacagtgcgtttggataagaccaaggtgaagaccggtgcagatggcaccttctccttcgccgacattgaagaaggcgaacacacgctttcgattgccaaggaaggctatgaggacgtctcccagcaggtgacggtctccggcgcggatcttgccatcgatcccatcaccctgaacaaaaccgttcaggtcgcctccgaaacgctgaagaccaagaagatggaagttcagattaagaagaacttcccctctgtgctgcagtacacgatgaccgacggcaaggtgatgtacggccagtccaaggatgtgcgcaccgttgaaatcaacggcaccaacatcgaactgggcgatgacgacgtgaccttcaagaaggtttccgacaccgaggccacctacacgctgaaggtcaaggatgaggccaagaagattgacgcggtgatcaccgttcagatcacggtcaaggccaaccagctgcacctcaacgtcaccaagatcaagaacaacctgtccgaaggcattcctgagggcaacggtgtggaggagaacgccatccagacgctgtccttcccgaaccagagtctcgtttccgtgcgttccagccaggaaaatgcccaattcactggtgctcgtatgtcttccaacacgcagaagcctggcgataccaacttcgcagtgaccgaagatactaacgtcaccgatagcgactacacctacggcttcatctccggtgctggcctgagtgccggcctgtggagcaactccgagcacgatggcacctatgtggcggctcctgtgcgcggcggcagccagaacacgcgtgtctacgccaccacccagcagactggtgacgccacctccctgggcctggccagcgctccgtggtactaccaccgcacggtcaccgattccaagggcaagaagtacaccgtggccgaaaccgctctgccgcagatggccgtggccatcgccggcgacgagaacgaagacggtgccgtcaactggcaggatggcgcaatcgcctaccgcgacatcatgaacaacccgtacaagtccgaggaagttcccgaactggtggcatggcgtatcgccatgaacttcggctcccaggcgcagaacccgttcctcaccacgcttgacaacgtcaagaaggtggccttgaacaccgacggcctcggccagtccgtgctgctcaagggctacggcaatgaaggccacgactccggccacccggactacggcgatatcggccagcgtctcggcggcgccgacgacatgaacaccatgatggaagagggctccaagtatggcgctcgcttcggtgtgcacgtcaacgcctccgaaatgtatccggaagccaaggccttcagcgaggacatggtgcgccgcaactctgcaggcggcctgagctacggctggaactggcttgatcagggtgtcggcatcgacggtatctacgatctggcatccggttctcgtgtaagccgtttcgctgacctcagcaaggaagtcggcgacaacatggacttcatctacctcgatgtgtggggcaacctgacttcttccggttcggaagattcttgggaaacccgcaagatgagcaagatgatcaacgacaacggctggcgtatgaccaccgaatggggttccggcaacgagtacgactccaccttccagcactgggcagctgatctgacctacggcggctacacctccaagggcgagaactccgaagtgatgcgcttcctgcgcaaccaccagaaggacagctgggttggcgactacccgcaatacggcggcgctgccaacgccccgctgctcggcggctacaacatgaaggacttcgaaggctggcagggccgcaacgactatgccgcctacatcaagaacctgtacacccatgatgtgtccactaagttcatccagcacttcaaggtgacccgctgggtcaacaacccgctgctgaccgccgacaatggcaatgccgctgccgtgtccgacccgaagacgaacaacggcaacgagcagattaccctgaaggattccaacggcaacgttgtagtagtctcccgtggttccaacgacacctctagcgcagcctaccgccagcgcaccatcaccttcaacggcgtgaaggtcgcatccggtgtggtctccgcaggcgatggcagcgccactggcgacgagtcctacctgctgccgtggatgtgggattccttcaccggcaagctggtcaaggattccgagcagaagctctaccactggaacaccaagggcggcaccaccacctggacgctgccggacagctggaagaacctctccagcgtaaaggtgtaccagctcaccgatcagggcaagaccaacgagcagaccgttgccgtctccggcggaaaggtgacgcttaccgctgatgccgaaaccccgtacgtggtgtacaagggcgaagccaagcagatccaggtcaactggagcgaaggcatgcatgtggtagacgccggcttcaacggcggctccaacaccctcaccgacaactggaccgtcgccggaaccggcaaggccgaagttgaaggcaacaacaacgccatgctgcgcctgaccggcaaggtcgatgtctcccagcgtctgaccgatctcaaggctggccagaagtacgcgctgtatgttggcgtcgacaaccgctccaccggcgatgcatccgtcaccgtaaccagcggcggcaaggtgctggccaccaactccaccggcaagtccatcgccaagaactacatcaaggcatacggccacaacacgaacagcaatacggaaaatggctccagctacttccagaacatgtacgtgttcttcaccgcgcctgagaacggcgatgccacggtaaccctgtctcacaagagcaccgacggagcacacacctacttcgacgatgtgcgcatcgtggagaaccagtactccggcatcacctatgagaaggacggcacgctgaagtccctcaccaacggattcgaaaacaacgcccagggcatctggccgttcgtggtctccggttccgaaggcgttgaggacaaccgcatccacctctccgagctgcatgctccgttcacgcaggccggttgggatgtcaagaagatggacgatgtgctcgatggcacttggtctgtgaaggttaacggcctgacccagaagggcacgctggtctaccagacgatcccgcagaacgtgaagttcgaggcgggtgccaagtacaaggtgagcttcgactaccagtccggttccgatgacatctacgccatcgctgtgggccagggtgaatactctgccggcagcgtgaagctgaccaacctgaagaaggctctgggtgagaccggcaaggccgagttcgagctgaccggtggcgtcaacggcgattcctggttcggtatttactcgaccgcaaccgcacctgacctgcagggttccaccggcaatgcacaggacttcggcggatacaaggacttcgtgctcgacaacctgaagatcgagcgcatcgagtcccagacccgcaccaaggccgaagcgcaggacaaggtcaaggaaatccgcggcaagtacgattccaagcgtgctgagctctccgatgccgcatggcagcagtatcaggacaccttggtcaaggctcgcgtgctcatcaacaagaatggcgcaaccgctgaggacttcaccaaggcatacgacattctcgtggccctcgacgagtacatgaagaccgctcccggcaacgagagcagcgacaagtacgacgtggcagctgacggctccgatgagctgggtggctacaccgtggccacgggcagcgaagagcctaccgcaggcctgccgagcgaaggcccggccgatctggcacaggatggcaacgacagcacccactggcacaccagctggagcgagaacgcagtcggcaacggcaccgcatggtatcagttcaacctcaacgaaccgaccaccatcaacggcctgcgctacctgccgcgctccggaggtatgaacgccaacggcaagatcaagggctacaagatcacgctcactctggcggatggcaccaccaaggatgtcgtcaccgatgctgagttctccaccaccaccatgtggcagaaggccagcttcgacgccgtcgagaatgtgaccgccgtacgcttgaccgtcctgtcttccgcaggccagagcgactcccaggccaacaagttcgcatccgctgccgaactgcgtttgaccacggaccgcgaggttgaggaagagactgtcgctccggacaagaccgacctcaacgacaccatcgccaaggctaacggtcttaaggaatccgactacacggctgaaagctggactgctctggtcaaggcccgcgaagctgcacaggccgtggcggataacgataaggccaccgcttacgatgtggctctggcgctgacgaacctcgaatccgctatcgctggtctcgagaagaccggtgaggagcctggcccaggcccggttgaggtgaacaagaccgacctgcagactgcagtgaacaaggcaagcaagctcgagaaggccgattacacgaccaactcgtgggaagctttcgccgaggcactgaaggctgcacagcaggtgctcgacaacaagaacgccacccagcaggatgtggataccgcactgagcgctcttcaggacgccatctccaagctggaagctgccaccgagccgaagccgaatccggaaccgggcgtggtggacaaggctgctctgaacgcgaccatcaacaaggccgccgccatcaacctgggtctctacaccgacgactccgccaacgctctgcgcgccgcgctgaagaaggcccgtgaggtctccgacaacagcaacgccacgcagaagcaggtcgacgcagctcgtgaggctctcgagaaggcaattgccggcttggtgaagcgtaccgctgccaagggtgatggcaatgtcgtctccaacacgggtgccaatgtcgtcacgattgctgtggccggattgctgctggccggtgccggcgccgcaatcgcctaccgccgcaatcgcgagcagatgtgatcatgaaaccgtaaggttcgcgaccacataaggagcactccttattatctcggccggtgccggtcagcaatgcccagcgccggccgtttttgtatgaatcagtgttttccggtcacccagcgggcatcggaatgcacatgggggatcatcatcacaatgaccgcaatcagacagacgatcatcaccatcaaaataacgtcctcatgaccgcgcgtctgcagcgtggctccagtcaaagcaccgagcgccaaagccagcattacaatcgcgcgccggccaagtttggactgctcatgaccatgcgccgaagtgtcagcgataatcccagttaacgtcatcgtcaacacagtcgtgggcaaatctggcaccgaaagcttacgagcagtggaattctgaatgcccatagccggtgcgagcagcacaatcagcagaataatatgcaaatcaatatgccgagcagttgggaagttcagactgggctgtgccgtgcgggcgatggctgaagcatcagtgccacccattgacggttcaggcgcaaactgattgagcagataaatgccgacgagcgcagctgccacaaaagccagctggattgacgtggacaccagcagatggcgcgcgcggttggcgccaaagtaatgaataatgcgtccgccgatgaacgcaccaatcatgaacgtggccagcgtgagcgccgaagtccaccagacgaagccctgcgcgtgggcgaatgcaaaaccaaggaacacaatgttgccggtcacattggccacaaatacatgaccgagtgccaagtaacttaacgcatccaccagtccggcgacaaacgtgagaataaccagagctggggaaagcagaccgtaccgatcatccttgcggggaatcagtgtgcgtcctgcttcggcaaggtgtgaggtcatggtgggagaggctttcctttgctgtttggcggtattcaatagctggcgcgcggccttgcacattatgaagtgtgtgccggacggtatatgtcaatgagtctgcgctcgcatgcggagtgcgtgcaacagttcgctatgagttcacctgcgattcgctgaacgcgcatagttcggtaacgcgatttcgctatatctggtcgtaataccgatgaggctaggaaaaggaatgattatgcagtcagataacagccatcatgaagcacatcagaacgacctgaactacagcagtgagtaccagtacgatatgtatatgtatgccgagtacggcatcgagtggtgattgagagccccgagtgagaattggactcacgacctcttccttaccaaggaagtgctctaccactgagctatcggggcgataatgtgcgcacggcttagggccgttgaacggcttgcacaacaatacacgcaatcgcgtattacgcaaatcgacgggtgtgcgaggaagtattcgggtgctctaagttgtacacatgagcgcaatattggctattttgcgctcatgtggcattcggatgtgccacgtaatcgcattttcgtgtttttatgcgctgttgtggcacgaaaattgtgggaattcggtcgtctcggaatatgtgccatgccacgccactgcaaaaacagtgaatgtgcacgattgtgcacatatttggaccgctgcgtatatgcatgtgggtgcggataacaaaagggttttgacaaaagccaaaaccctgatggcggaggatacgagattcgaactcgtgaggctgttacaccaacacgctttccaagcgtgcgccatagaccactaggcgaatcctccatgcactgcagtgcttgctagaagtaagctccgtaggcaactcgaataagctaccacagctttcggataaatgcacattcagtgccggctgcggcgtgtcgctttgtggacaaggaccaccaatgagtgcctgcgctgatgtgcaggtcgttcgtacggcgtgtgcaacaggtgatctcaccgggggatgaaccagtgcaaatcaaagcgactcaaggcaagtcagcaaacccgaggcaaaccagaatgaacatgcgcatgccatcgcgtgaattattgccagcctcttgccgtgatgcaacatagtggttttaggctatgaaccttggtgaaacagttggtcatgcaatatgagggatggggagtggccagtcgcggggagttcataattcgggaagtctcccatctgtgagcgggacaatatcgaatattgagacaatctgcggtaataattgatcgaaaaacagtgcctaatacctcttaaatcctaaaaaatcaagactgttcctcaaaaaagtttttctttatattgagtagttggtttttgattacttagctgcgcagagagaggaataggcatggttcgtcgcgcccaggctgctcttcggtccgttgaacacaccagcgtgaggcagctgcgagtcctggctgcgattgtatttctgttcgccatggtcatcgccactgtggctcctgcagttacggctccgatggccttcgccgacagcagcaccagctcgtccagcgttgactacgccacctgggccgaagtctccaaggcgatggacaagcagctgaacagcggtcttaagacgtacaaggatggcaacaccgctggcgccacctccgatttcatgggcgcgtacaacaagatttacgtggcctccaacttcaccgcggtcgtgcacgacaccattggcgcggacaagcagctcgcccaacagcaggcattccaaagcgttcagaatctttcctacacgcctggcaacgacgatcaactggctcagcagattgatgcgttgaccgccgatcttgacgccacggcccagcagctcgactccaacgccgatctcgccaagccgaaggcgtacgccgaagcgctgcaggcgcagctggccaaagagcgcaaggagctcgacgccaagaaaaagaagaacccgggcaagggcaatcgttcatggaccgacgtggccaacgaaatgaccccgattctcgacaatgcatacaaagcttacgaaaagggtaatggtgccaagggcgccacgctcgtgaacaacgcgtactaccagtattacgagaagctcggcttcgaaaagaacgtgatgaacgccatcagcggcaaccgcgtctcgcaggtggaataccagttcaagatgtgccgcaagtccatgaacaccggcgtatccctgaaagacaccaagaagctgatcgacgacctcaaggccatgctgatcaaggacgccggcattcttgacggtggtgccgccgataaggaagacggtttcaccaagctggtcaccagctcctccggccaggcgttcctcgtgcttatccgtgagggtcttgaagctctgctggtggttgcagccatcgtcgcctacttggtcaagtccgataacaagcgcttcgtcaagtggatttacttgggtgtgctcgtcggtctgctcggcgccggcttggtggctgtgatcttcgtgttcgccttcggcggctccggcccgattcaggagatcatggaaggcacctgcgcactgatcgccatgggcatgctgctgtggacgagtaactggatgctgaacaagtccagcgtggaagcgtggaaccgttacattcgcaagaagaccgaggctgctgtggctgatgccgaagccgccgcaagtgccgacaacgtgacgttgaaaaccgtggtctcgctggctatgctgagcttcctcgccgtgttccgtgaaggcgctgaaaccgtgatcttctacgagtccatctacacgatgagccgcgatactcgcggtatgtggatcggtggtctgaccgccgcggtggtgcttgtcggcatcttcctgctcttccgcttcacctccgtgaagattccgattggtccgttcttcctggtcacttcgattctgatgtctgtgctggtggtggtgttcgccggcggcggcgtccactcgctgatcgagggcgacttgctgcccgccttctacctgaacggtgtgccgacgaacgattggcttggcctctacccgtacgtcgaatgcctagtggcgcaggccatcgcagccgttgcggttatcgcgctgttcgtggtcggcttcatcaagcagcgcaagctgaaggcgcaggctactgccgaggtcccggccgtgaaggcgtagcccgtctagctcgtccgtttcctcccataactgcagacaactgacagacttgcggcacggcctcggatcgatgccaattcctccagcccacgccgcacttatctcataactgaataattgcaattatctaagcgtgaatcctaattcaccagagatagagaaaaggaataacaatgatgaagaacaagaaactggccgctctgctcggcctgctgctcgccggttccatgaccgtgtccatggctgcctgcggttccaccaactccgcatccgacactaaggctgactcctcctcccagtcttccgactcctcttcctccgattcttcctccgattccggcgccggtttcgaagaggttccggttggcccgtccggtactgctgaagagcaggatcaggacgccggcccgctgaccgtgggcgctgtgtacttccagccgatcgatatggagccgtcttccatgggcctgaaggctgctgacgcttccttccacctcgaggccgacatccatgccaaccagaagggcaccgagctcggctacggcaagggcgacttcgtgccggatctgaccgtgaactacaccatcatcgataagtccaccggcaaggaagtcgagggcggcaccgccacctccggtaccttcatgcagatgaacgcttccgatggcccgcactacggcgccaacgtcaagctcgacaaggctggcacctaccagctgaagctctccatcgaatccccggcctccaagggttggatgctgcacgttgacccggagaccggcgtcaagggccacttctggaccgagccgatcgaggtcaccttcgacaactgggattacactcctcgccagtggtgattgactaagcagaaagccccctcgtcagagggggctttacgccgctttagggagataattcttaggacggtctaaaactcccctcagtccgcttcgcagacagctcccctcagagaggggagcctaaggtgaacagagaaaggacgcgaatgcttgaacaattcgtggcagtgatgccgggcactttggcccccgcattgctggtgatgagcctgagcgtgatgctcacggtcggcgaggggcgagataagccgataagctcgcattggcgtctcatcggcctgatcgtcggtctgatcgccgccatcgtattcgccggcctgcgcgcctcggccgtgatcaatcagcgcacgttcgtcaactacccggtgttgtggtgcgcgatcattgccgacatcctgaccatcgtcgtggtggtgttcgcacgccgcatcaccaccaattggcagcagcacaaggtgttcatgcacatcgctaacgccgtggccgccatcgacatcgcactcaccctgttctacgcgctgccggacgtgattctgcagctcaccatctgggtggaaccaggggagaccgcattcacttcggccatgctgctgcgcgctcttggtttcctgcttggcgtggccatgtccattattgtggccgccatcttccgcacgatgcgcaccactgccgtgcgctgggcgttcaccgtggccgtcgcggccatgatggtgattctgctgattcaacacttcactggtcttgcccagattctgcaggcgcgaggcttcccgatgaaccatacgatgttcgtggcgctggcttggtccatcaaccagaactccacgatgattatggcgcaggcgctggtgttcctgattcccgccgtggcctccatcgtggccggtttccgtatgaaaacccatgatgtgccgggagccaacgaggccacgttgcgccggcataaggtattccgccgccacgccatcgccgctgccgtgtggagccttatcgcagccatcggcgtcacagcaaccctgaccgtgggcgttgccgcgacccatcagaccatcaccctttcgccgccggaagcctactcgctcaaggacggcgtggccaccatccccttcagccaggtcgaggacggccacctgcaccgcttcgaatacaaggccaaggacggcaccgtcatgcgcttcatcatcatccgaaagaacggtggcgcgtacggcatcggcctggacgcctgcgagaactgcggcgacgctggctactacgagaaggacggcaagatcatctgcaagaagtgcgaggtggccatcaacctggcgaccatcggcttcaagggtggctgcaacccgataccattcccgtacaagaccggccacggcaagatcaccattcaaactacggatctggacgcgctgagcgcccacttccggtgagtcaggcaggagacaagaatcatgttctttctgcgcatgattactcgctcgttcacccgacagctgcgccggcgcctgcttatcgcgctgaccgtatgcctgtcggcgaccgtgtccgtatcgatgctgggcgtcgtgttcgacgtgggcgacaagctcaacgccgagctgtccacctacggttcgaacatcaccgtgcaatccaaggcggatgcggtcgtttccgacctgtacaacaccgagtcgggcggcgcgacgtccaccagcgacccgaccgcttttctgaaggagtcggacgcggccaagatcaagacgatcttctggtcgttcaacatcaccagcttcgcgccgcagctcaacatccacgccacggtgaacggtaccaacgtgccggtcgtcggcacgtggttcaacaagaacctcaagatctccaccggcgagactaccgtcgtgggcgtggaaggcatgcgctcgtggtggcagctggacggcaagtggcccaaagacgattccgaccagggcgtgatcggcaagacgctggcctccgaactcggcgtgaccaccggcgacaccatcaccctcaacaaaaccaccgcctcaggcaagaagaacgagcagaaaatcaagctcaccggtgtctacgattccggcgacgaggacaacggctcgctctacatcgcctcctccacggcccaggtactcgccgacctgcccgattcggtcgacaaaatcgaggtcaaggccctgaccacgccggagaacgacctggcccgtaaggccgccgcgaacccggccgcgctgagccaggaggaatgggagacctggtactgcaccgcctacccgagctcgatcgcctaccagatcgaagaggtgattccgggcgcggtggccaagcaggtgcgtcaggtcgccgcgttgcagggcaatgtgctgcagaagacgcaggccgtgatgattctgatgaccgtgctgagcctgatcgccgcagccgtggccgtggccaacctgatggtcgcctcgatcggcgaacggtctggcgagctggcgctgctcaaggcgctcggtgccaccgatgccgcggtatcccgcctgatgctggccgaaacggcggcaatctcgctgctgggcgcgattgtgggcgcgttgcttggttccggcgtggcccagctgataggccgggtggtattcggttccggcatcacgatgcggccgatggtgttcgtgctggtgttcgtgctgctggccgtcaccgtgctgctggcgtccgcctcctcgattcgttcgattctgaatctcaagcccgcggaggtgctccatggccgctgagtttatctacgtaggtgtggaaggaggaaaccgatgaccaacaccggtatgttcttcagaatgctgttcagcgccgtgttccgccggcgttcgcgcgcggtgatggccgtggtggcgtcgctggtcggcgcggccacactgttctgcctggcgatgatctgcctcgccgcgccgcagcagatgaacgaggagatgcgcgcgtacggcgcgaacctgattgtcacgcccaccgaatcgaccaatgccgacggcaaggccggcatcgacaaggcgatggtgcagcacaccactgaaatggtcaaggccaagggttccgcgaaatacgccacctaccgctacgagaacgtgcgcgtcaacgcctcgccgtacgtgatggccggcgtgaatgcggcgcaggtcaagaacctcaaccatcactgggtggtcgacggctcgtggccgaccgacggcaaggtgctggtcggacgtgacatcgccgacgccatcggcctgagaatcggctccgccatcaccatcggctaccgtgcatccgataacgccagcaccaacggcacttcgtcgaactcctcgatcgaccagcaaaccaaagacggccgcgtttccagcgacatcatggacacctccggcaccgaattccgcgtggccggcatcgtggacaccggcggcagtgaggactcgatcatctacgccaccaacgccgacgtcaacaagctcaccggcatcacgcgcggcgtggacgtcatcgagtattcggccggcgccagcgatctcgcgggcctggtgtccagcatcaacgacatgacctccatgcacgtcaaggcgcagcaggtcaccaagatcaccgcctccgacacccgcatcatcaccatgctgcagacgctgttctggatcgtctcgctggtggtgctggtgctgacgctcgtcggcgtcggcaccacaatcagctcgatcgtctcgcagcgacgcaacgagatcggcctgcgcaaggccctcggtgctagctcgcgtgccatcggcaccgagttctacatcgaatcatcgctctacggcctgattggcggcctcatcggcaccgcaatcggctacggactcgccagttggctgtgcgtggcggtgttcgaacgctccatcgtattcaactggtggctggccctgatttccgtgctgttcagcgcgctggtcgccatcgtcgcctccatcccgcccgtccaccgcgccacccgcatcgaccccgccgtcgtgcttcgcgaagaataaagaaagagaaacgtcatgctacttgaactcgaccacatctcgaagatctacggcgacctgcatgccgtggacgacctcaatctgaccgtgccggaaggcgaatggctcgccatcgtcggctcctccggctcaggcaagaccacgctgatgaacatgattggctgcatggacacgccctccaagggctccgtgaagctggaaggccgcaagctggaggacctgaacgccacgcagctggccgacgtgcgcaagaacctcatcggactggtgttccagaagttctatctggtgccgcacctgaccgccgtggaaaacgtgatggtggcccagtactaccattcggtggtcgatgagaagcaggccatggaggcgctggaaaaggtcggcctgaaggaccgcgcccaccacctgcccggccagctctccggcggcgagcagcagcgcgtgtgcgtggcccgcgcgctgatcaacgacccgaagctgattctggccgatgagcccaccggcaacctcgacgagaagaacgagaaaatcgtgctcgacctgttccgcaagctgcacgagcagggcaccacgattatcgtggtcacccacgatgcgcttgtcgccagctgcgcgcagcgcgagatcatgctcaaccatggcgtgctcgtcggtgagaagtggaatgacgaggatgcgcgcaaggcctacgaggcggccggcggcaagcccgcctccacgggtgcacaggtcgagggcgcgcagaacggcgagaccgccattggtttcgctgaccccaccaaggccgcgaaaaccggcggcgaggagtagggccgtcaggggcatcgagcagtatgtgaggaatacatggcaagctgatggtctctcccccagtcagcttcgctgacagcccccctcgtcagaggggggcttaaggagcgtgaatatgaccgaaaagagtacgttgaagaaatccgcgacattggcggcggccggactggtcgtggctggcgcgctgctggccgggtgcggcgaatccaaggccgcgccgatggacgatgcgtacgccggcaactcgggcgagaccgagaagtcgcaggaagagcagtcgcaatcccagtcgaacggctccgatagctccgacggctccgattccggctcatcgcacaacgacccgtccaccaccacgtccgacaagaaggacaccggcaactacaaggacggcaactactcgatcaacggccagtacggcccggtcggcgaggattccatcgacgtccatctgaccatcaaggacggcaacgtcgagaccgtcaatatcattgggcacccgttcaccacgatttccaagaaccatcaggacgacttcgccaaagccattaacggcgtggtggacggcaaacctctgaagggtctcaaagtggacaaagtcgccggcgccagctggacctccgacgccttcaacaaagccctcgaagtcgcccgccaggaggcttcgattcaggagtaagaccgctacttcagcaatgctggccacagcagatcggccatgcgcgaggcccaggcggtgtcgtcgtccatcgctttgccctcgatggcctcatacgccaccaaagatccgataatcgtggacaacagcaacttctcgtcaacgtcctcgcgaaacacgccctgcgcgactccctgcttgaggaacgcccccacacgctccagccacggggtcaccacttggtcgacgatgtgctggaagaactcggcctcgctggacaatacaatgcccacgcgcttgacgtcgatgtcgttgtcgcgcacccaatcgaccaatcgctgcaatagttgcgtgaaatgctcacgcgtggggctgggcactgggtcggaatccgggatggccagatacatcgcgctgatctcgtgcagcagctcgtcggcattatgatatcggcggtaaatcgtggttttggccacaccggagcgccgggccacctcctcgatggtcacgccgctgatgccgcggtccaccgcaatctgcagcgtggctcgcatgagcttgcgatccgtcgcctcgcgcgtgcgctcaccgcgcggtgtcgccgtcgtgtctgtcatctccgtcatctcttctcttcgaaatatgctcccgtacgctcccgctggcgagagctggctggcaaagccagactgagggtggtaagtccatgccgtttgtaggcaactcccggataatacctactagctcagcactttagtgctctcgacttgggctacataccactggttgaaccgcaccagtggcttcctgagcaacagcccaagcaacagtagcggcggcacgaatgccagcagcattccggcggcccgccagtaatccatgtcgtagatgccggcgatggccgcacgcatcatcgtcaccgcatgggtgagcggcaagagcggactgactttggcgatgaagtcgggcaacatctgcaccgggtaggcagcgttcgcacccgaaatctgcacgatgagcataagcacgccgattgccttacccacattgccgaaactcaccaccatcgtataggtgaagaacgagaacaccagcgaggccagccatccagacaacataaacagcagcggatgcacggcctgcacgcgcaggaacagcaaatcgccaccgagcgacaccgtggattgcagcagcgcaatcagcgcgaacaccccgtaatgcccaaggaagagccgatgcggccgcggatcgcccaatgctttgcgcgtccggcgagacacggtggttttcagcgtcaccaccatcagcagcgcgcccacccacagcggcagcagcgtgtagaacggtgccatcgacgaaccgaaattcgccaccgggaatacggccttgcgcctgagctgcaccggtgcggccaacgtactggccagcgtttcgggatcattgcccagcacctctttgaccatgctcatatcgccactgtttagtgcgtcgctcagtgtgctgttgaacgaagccagttcggcaccggcggaacgcagtttgccggacaccttgtccaaggtagtgcgagcgtcactgagcatatcgctggcgtcgtcggaagtccccttcaggtcgccgagcgtggagtccaactgggtggcgccggaactcagtatgccggaggcgtcagcgacggtggacgacagggagtcgatttgcggtttcaccgtggccgagaaatctgatttgatattggcgatactgttctgcgcttgatcagccagattcttgacctgcgcatgctgatcctgcgcgtcctgattgccttggcgaatattggtcgccgctgtattcagcgcttgccgcagcctgttttgccgtgcgattgaacggtcaatcgccgtgatgatggatgagtcgttgcccagtatgccggccaacgtgttgcgaatttcagtgtatttctccgtctgcttgccaatggccgtggcttgacggtccaattcgtcggcggccgtggtggcaccatcattcgcgtcggaatacagcttgtctatggaatcggacaccgcgccgaaactggaggcgctcgcgtccagtgagctgctcatcgcgtcagcggtggtgcccagggctccggccacgtcggtgacttcctgtttggtgctggcaagatccttgccgccttgtttggcggcagaggaaacctgagtgattagtgagttcgaggtgtcgagcaaggcgccggccgtatcggtcaatgcgctgtatgtgccaagcagatccgccgtatcgtcaagctgtgtggcgaaattggcgatgttggcgttgaaggtattcagttgctctttggcttcgggcttggacagctgatcggccagcgaagacgcgatttccagccctgccgaagtgatggtcttggcgaacgtggtgttgatttccgccgcaacctcatccgtgccctcgttgagcagattcggtgccagcgcgttcttcttctcgttgcggtaataggtcagttcggcatgctgcacgtcgtcggagaagaaggtcatcatgtctttgctgaacgacttcggaattacgatggccgcgtagtatttgccggatcgtgcgccctcgacggcatcggctttggacgtgatcgtccaatcgagctgactgttggcgcgcagcgcgttcaccacctgatcgccgaccgtgactttcatcgggatcaggtcggaacgatacccctcatccacattcgccaccgcgaatttcaggttcttcatattcgagaacgggtcccagcatgcggccacgttgaaccaggtgaacaggccgggaatcatcaccaagccgatcacgatgatgatggagaccacgttgctggtcaggcgtttgatgtcgccggtaaacagtttccacatggtgttcatcgtgcgtgcctgccttccttggtcggcggaatagtggggatgattgcggtaacggcggcgctcgggtccgcttcttcgtggcgttcggcggaggtgtcgcgacgcttggccttatgcccgtacagcatggcgcggatcgactcgtcggagaggttgccgagctcggtttggcggcggatggaatcgcgcatgaattccacgaccatcaggaagcccatgatgatgagcacccatgccagccatgtgcccatgactacgattttctcgctggtggtcagcacaaacacgataatgagcgcggccggcaccacgaatccggcgataagcgcacccagcagcagccggggataacggtaggcgaatttggcggcccgacgttcgatggcatgacggtattcgtcgcggtcggccagtgctgcaatggcctgagtgacacggtactcgctgccaggcaggtgcaccggctcgccgataatcatgtcgctttccttgatttcccgcgcgaacaggcggttgagattggccagtttcggccgggcgccgaggccaagcgcaaaggccagaaccgcgaaaatcagcaatttgccgatataggcgaaccagtggccgtcgtagaagccgccgatggtttcacgcattgcgtcaatcgaataggtgaacggcagcagcgggtagatggcgcggaagaacgcgggcatcatttcaatcgggtacaggccggaggcgcccggcacctgcagaatgaccagcgccacgcatacgcctttgcccacgtgcatgaacgtggtggagagggcgaaaatcaccgacatatacaccagtgaggtgatgacgcaggtgagcagaaacactggggcgctcgcgcattgaatgccgatgacaagatcgccgatggccgtgaccaggccttggacggcggccagcgtggccagcagcaggaagcgaccgagatagccttgggttggcgtgagatcgtcgatgccctcatcgtcggtttcgagtttgggaatgaccacgagcacgaacgcgcccacccacaaagacagggtggtgaacagcggtgccatgccggaaccataggaggcgaccggatagacggcctgttcgctgataacagtgggggagagcatgaagtcggcgattgtggcggcatccagtttgccgtcggtgccgatcagggaactgagtgaactggagatgctcagggctttgatgtcggtgaccagcgtatcgagcttggtttgtacgccggccagcgccttatcggtgtcgcgcagcgcggtcaccgtggtggaggctgctttgtcgagttggtcgagggtatgcttcgactgatcgatgagtgagccttgcgacgtgatgccggtcgacagagtgctggcggtcgagctgagggcgttgagaccggtgttgagctgaggaatggcgccggaggtgatggtgccgcgagcggtattggcctcgcgcaccgtggtttgggtggcggtattgagatgctgcgccaatccggcggtgtctgtggaggcattgccgatagtggtgttcaggctatcgaggttgcccagtgcgccggcaagctcgctattgcggctttccagtgtggcgatggcggattgcagcggttctcgattggcgttcggcagccctttgagttggccgatgatgtcggcgttcgcttggttgatgtcttccgccgtattgatcagtccgcctacctgctgattggcggcgctgatggttccggttaccgtgcccacgctttggttggcctgtgctgcggcttggctcagcaggcttgagccttggtcaagcgcttcggacgtggaggtgacgaagccgttcagactggtctgggtagtgccgatcagggtggagacgccggccaggccttctgcagtgtcgatgccaagtgtgcgcgcgtcgtccaacgcctgacgtgcggtgcgtgtctgctctggggtgtcggtgagtttggtggtgagcttggcgatggtgctgcgtgtgtgctgcacatcgtcggaggcctcggcaagggccgtgagggccttggctttggtggtgtcttcggtactgatggctttgccgtcaaccgtattgatgacttcggtaagtacttcggatacggtggagacgaatgtggaattgaccgtgcggtccacagtggacgcgccgacgtcggtgactttgggggcgatggcgctggctttttcgttgacgtaatactccagagtgggccgactcttgccgccggtcaccacgccggcgagatcgtcggaaaagtctttgggaatgatgatggctgcgtatgccttgccggattccacttggtccatggcctcggcttcggtgacgaaggtccagccgagctggtcgttgcttctcatctgcttgacgatttgatcgccgaggttctgcttgccgatgagcgcgttgtcggtgccgtcgtcattgttggcgatggcgacggtgatgcctttggtattgccgtacgggtcccagaagccgacgatgttgtaccacgaatacagtggcgggatgaacaccatgccgaacaggatcacccatgcggccggcaccttgaacaggcgcaggaagtcgcgtctgaggaccttgaagatattgcccactgatacctccggagcttggtgttgcttggttgctacgttttccgtagcgatacgttaatcgtagcgctacgtttgtagtagcgtaatacggctgccggagattattggggtgattgatgatatctttggcggaataacgccgctgtccagcggcttatcgtgcgtcactgggcattgtgcctaattttttgtggctggggtgctgtgtggccgggtgtgctgtgtgtgttggtgtgaggctgccctccatggggcggtaaaaccttcatcgggcggtaagtggcccatggggcggtaaaattcccatggggcggtggcttaaaatggctttattccgcggaatgcggttttgggctaaccgccccatggggtaattaccgcctcatgagagagctaccgccccatgggtaaaccgttgtatcagctttcgatggtgccggattggccatcgatggccgactgctcgttctggctggatgactggtcggagctggagttgccggaagtgtcagaacctgtgccggagctgttgccggtgccggactggccgtcagtgccttgactggagcgaaaggcgttctggaacttattgacaagatttctggatggtttttggatgctttctgaaagcgatagacgggctcggtgtccggcaatgtagacagacatgtaccgaccgcccatcaagttcagcaaaaccgcaatcgggtgatagggtgaggggacgctatgtggggaggaaaccatggttgaattcaaggacgatggcacggccactacccccggcaagccgcgggagaaccgtgacgccgagtccgcagtcgtggccgatctggtggccgtcgaactggacgacgccggcttgaacctgaacgccaagcgattaccgattctggcgcgcatctatggcgcggtcgtgctgctggacggactcgccacattgccgattatggtgatttccatcctctatgccgtgcgcgagattctggatggtcatgtgcacgtcgatgcgatgagcctgaccttcatcctgtccgcgattcatgcggtggtgctggtagtcagtgccgcatgcctgattgtgctcggcgtgatgctgctgcgcaatcatcgccggtatgccgcgcgctggacctacgtgctgatgccgttgacgttggccgacggcatgctgtcgctggccctgaccggccttggcttcaacctgctgctgccgctgattcagatgattattctcgtcgtgatttcggtgaccgccgatccctccctgagcgaggaacgccgtctgcagcgcgcgctcaggcgtatggacgatcgcgatgattatgaatcggctgtggcggccggcatgctaggccgcgaccagtccggcaagggctatattgcgctggactttttcaatatcttctggctgtttaccatcgcttcggtgggtggcctgattgtggagacgatctaccatatggcgctgtataacggtgaacttcaggaccgcgctggtttgctgtggggcccgttctcgccgatttacggctgtggtgcggtattggtaaccgtgtgcctgaatcgtctgtggaaggcgaatccgttcttgattttctgcgcttcggcggtgatcggcggcgcgttcgaatattgcaccagctggttcatggaagcggcgtttggtattaccgcgtgggattacaccggccgttggctgtccatcgacggacgtacttcgggccgattcatgttcttctgggggctgattggtgtggtgtgggtcaagtggctgttaccgcgactgctggctctgattaatcgcattccatggaaagtgcggtattcgctgactgcggtatgcacggtgctgatggtgatcgacattgccttcacgctgatggccttggattgctggtatgggcgcatggccggccagccgcaggattcaccggtcgcgatgtggttcagcgaacgctacagcgacgcttacatggccaatcgcttccagaccatgcatatcgacccttccaaggccgggcgtatgtgaatggccggcaagtaattacgcttcgcgggcagaaggtgcgtagaacctaagacagccctcgcgtgtgggtggtaagcgggatacactttcaagcgttgaaggaatgattccctccgctgatgcgctgttttgtgacgcgcgtgatgacgatgggacaatcaaacgaaaggcaaggcacatggccgaagctacagcaaacattggtgtgattggactggccacgatgggctccaatctggcgcgtaatctggcgcaccatggcaacacggtggcgttgttcaaccgccactactcgcgtaccgagaagctcatgaacgagcatggcaccgaaggcaacttcgtgccggccgaaacgctcgaggaattcgccgcgtccctgaagcgtccgcgtaccgccatcatcatggtcaaggccggtgctccgaccgacgcgaccatcgcgcagctggaagaggtgttcgaaccgggcgacatcatcgtcgacggtggcaactccttcttcaaggacaccatcaagcgtgagaaggaagtacgtgccaagggcttccacttcgtgggttgcggcgtgtccggtggtgaggaaggcgcgctcaacggcccgtctctgatgcccggtggcactgcggaatcctggaagaccttgggcccgattcttcagtccatcgccgccaaggtgaacggcgaaccgtgcgtgacccacatcggcaccgatggtgccggccactttgtcaagatggtgcacaacggcatcgagtatgccgatatgcaggtgattggtgaggcgtatgacattctgcgccgtggactcggcatggatgccgaggagattggcgacgtgttcgctgaatggaacaagggcgaccttgactcctacctgatcgagatcaccgctgagattctgcaccacaaggatgccgagaccggcaagccgttcgtggacgtggtcgtggatcatgccggcatgaagggtactggtacgtggaccgtgcagactggtctggaatgtggttctcctgtggctgccatcggtgaagccgtgttcgctcgtgcactgtcttcgcacggtgagctgcgtgaagacgctcagaaggaaggtctggctggaccgaacaagaccatcgatctggccggagaagacaaggccgcgttcgtcgaggacgtgcgcaaggctctgttcgcttccaaggtcgtggcctatgctcagggcctgaacgagattcaggacggtgccaaggaatacggctgggatatcaacctgtccgaagtggcccgcatttggcgtggcggctgcattattcgcgcccagttcctgctcgaccgcatcaccgaggccttcaagggcgataacccgccggcttccctgctgttcgatccgtacttcgagaagatcatcggcgaatcgcaggacgcatggcgtcgcgtgatcgttcgcgcggtggaggccggcatcccgaccccggtgttctccagctccctggcgtactacgatggtctgcgctccaagcgcctgcccaccgctctgacccagtcccagcgtgacttcttcggtgcccacacctacggccgcgtagacaagcccggcgtgttccacacgctgtgggctgaagaaggcaagcctgaaatcgaggcgtagcctcgtgatttcaggtttaggacagccctgtgggctgtccggccttcttcaggctcggcgatagccgagctgagaaaacagcaagcctgaaatcgaggcgtagcctcgtgatttcaggtttaggacagccctgtgggctgtccggccttcttcaggctcggcgatagccgagctgagaaaacagcaagcccgaaatcgaggcgtagccatagacgaattaagccccctcatcagagggggcttaattcactcacaactcggtgacggtttcttcggtggagaaccagatgaactcgtccactccgttggcgtaggaggacgggtaatccgggttgttgggctgctcgaagacatgggccagcgattcggctttgccggcaccggcggcgaagaaccacgtatggcgtgaacgcgcgatgagcggcgcggtcaatgaaacacgcagcggcggcatcttgggggagtggttcacacccacggtgagcctatcggtaaccttgacctcatcatgaccagggaacagcgacgcatagtgaccgtccggtcccatgccgagaatcatcagatcgattaccggttccggtcccaattcattcaccaactcgcgctcatagtcgctcgcgacatcgtccagcaacgcatcatttgtggcatcggcggcggcgcgaacggaagcatcatcgctgtcggcctgatccatcacatcggcgatgtcgtcggctgaacgggtatcggccgccatctcatgaatattcgattcaggcagcttgccatctgccaccagctggtcaagcagcaggcgacgggcctccagagcattgcgatcggtgtcgtaagccggcacaaaacgttcgtcgctccaccagaaatgcacgcgtgaccaatcaatcgcatcagccagcggatcgctcagcaccaagcccaacggctgcgcggccgaacctccagacagcgccacatccacacgcgtgcgatgcgtgccatcaggcaatcgttcggcgagcaaatcgagtagcgccaagacaaaacgttgcgcgccagcctgaatcatcagatctttattcggatacacaatgagttttcgagttgccatgtatggtccttgtatggggtatgtgtcgtactttgcaatgtggattgtgttgtcagttgacaacgcataatacgggtggcatgccgggaatctagccatttgcagcaatgaaatgtgttgtcagttgacaacacaatgtacattgtgcggcatcgcatgaggtaggaaacgatgagcaacggcgttggcatggctcggccacaattgccgaactcattccaacgccgctgtggcaacgggttctaccgacttcagtgacgaatcagatcccagccttcgttgatgacctcggcgtagatctcatcgggatcgatgcgacgcagttcctcggtcaggcagtcctcgatggtgcgcatcggcacggacacttcctgcggagtctggccgggcagcgagatcagcgcttggtcctcatgcgggcgttccagcgagatcacaccgtcctcacgggtcaggtacacgccggtcacggcctgcgcgtcgggcacgaactcagtttcgactggtacgccaagtttcagacgcagccatgcgcacagcatttccagaggcaggaagtcggccttgccggtcaccttcacggcggtgatgggcaggtgcggcggctgatcgagcatcgaggcgagcattgcgcgccagacggtcagtcgtgtccaggacaagtcgatatcttccggtgtccaattgcggcgcaaacgctcaatcgtggcctccggattattggagtgcaacgcgtcggtgatgcgactgcgggccatcgcacccatcagatccttggccgggttcgacggcggtgtggtcggccaccacgccactacaggcgcatccggcacaagcagcgggataaccagcgtatccgggtggttgataaggccaccgcgcggacgcaagatgatgatctcaccggcaccggcgtccgcgccgaatcgcacttgggcgttcaggttggaatcgttcggatcgttcggaccgtcggtcaaatcgacggccggattatcgcgactcgcgctcacctcggcggccacttcggccgcgttcggttcgccttcgccggactgatcggcaggattggtatccggtactacggcaatcacgcggcacgggtgctcacggctggccgagttcgcgatttccagcgcatgctctaggtccgcgtcctcggtggcgatgagcagcgtcagcacgcggccggtcgccgattcgccgcgctcctcgtgcagctgttcgattttgtgcgcaatctcgcgggtgcgggtgttcggcatatcgatgatcatggcatcctccagtggcggccgtcgcgcgccagcatttcgtcggcctgtgccggaccccacgtaccggcgcggtaggcctgcggctggccaagcgtggaccagaattgttcaatcggatcgaggatctcccagctgaggttcacctcttcggtggtcgggaacaacggcggatcaccgagcagcacgtccagaatcagtcgctcataggcttccggcgagttctcggtgaaggagcggccgtagctgaagtccatgttcacgtcacggacctccatggtggagccgcccggcaccttggctccgaagcgcatggtgacgccctcgtcgggctgcacgcgaatcacgatggcgttcttgccgagttcgcgcacggcggtctgctcgaacggcagatgcggggcgcgcttgaacaccacggcgatttcggttacacgcttgccgaggcgcttgccgcaacgcaggtagaacggcacgccagcccagcggcgggtgtcgatatcgaggcggatggcggcgtacgtttcagtggtgctcttggggtcgatgcctttttcctccaagtagccgaccacttcgtgcgagccctgccagcccttggcgtactggccgcgcgcggtgttggcagcgaggtccttgggcaggcgcacggcggaaagcaccttggtcttttcggcggtcaggtccttggcggtgaagctcaccggctcctccatggcggtcagagccatgagctgaagcaggtggttctggatgacgtcgcgtgcggcgccgatgccgtcgtaatagccggcgcggccgccgatgccgatgtcctcggccatcgtgatctgcacgtggtccacatagttggcgttccagatcggctcgtacatggcgttggcgaaacgcagggccagcaggttctgcacggtttccttgccgaggtagtggtcgatgcggaacacggagctcgggtcgaacacttcggataccacgctgtcgagttccttggcactggccagatcatggccgaacggcttctcgatgatcacgcggcgccatgcgccctcggacgagcgcgacaggccggaggcggccaactgcttggcaacctgtgggaaggcgcgcggcggcaccgacatgtagaaggcatggttaccctgcgtgccgcggtcgcggtcaagctcctgcacggtggcgctcagacgctcgaaggcctccgggtcgtcgaacgtaccctgcacgaagcggatgccggcggccagattgcgccaagttgactccttgaacggcgtacggcaatgcgcctggacggcggccttgacgaattcgatgaaccgttcctgtgtccagtcgcggcgggcgaagccggtcagaccgaagctcggcggcagtaggccacggttcgccaggtcgtagacggccggcagcagtttcttttgtgccagatcgcccgtgacaccgaaaatgacgaggctgcatgggccggcgatacggggcagtctgaggtcgcgcgagtcgcgcaggggattgctccaattgggggattcactcataatgtacaagggtagtcgccggcggctatctatcgctagaggcgatatgcgatttgggctgcgatttgggccacattgcgtgtgctgtgccgtgcgttgggccaatcgcgtacgcaacgccgtagttgaaatatcccaaaacggtgtgtattttagaagagttgcccctttagctcaacggttagagcagcgtccttttaagtcgtgggttgtgggttcgaatcccacagggggcacaacaaatccttggaatcgcaatggttccaaggatttttttgtttcgaccagcctggctcctagagtggtgtcccatgtcatgcaccacgattcttgtcggcaaaaatgccagttacgacggttccaccatcatcgcccgcgatgacgattcgggctcgggccgttacgatcccaagcgcttcgtcgctgtcgcccccgacgaccagccgcgccactaccgcagcgtgctgagccatgtcgaaatcgaactgccggacaatccttgccggtacaccatcgcaccgaacgtgctgaataatcgtggcattctggccgaagccggtgccaacgaacacaacgtggcgatgagcgccaccgaaaccatcgctgtcaacgagcgcgtgctcggtgcggacccgatggtcgagttgcggccggctgtcggcgaaccggacagcaacgattatcaggccgagcagcccggcggtatcggtgaggaagacatcatcacccttgtgctgccgtacgtcaccaccgcgcgcgagggcgtcgcgcggttgggcgaactgctcgaaacctacggcacctacgaatcgaacggcgtgattatttcggatgtggacgagatctggtacgtcgagaccatcggcggccaccattggatcgcccgccgagtgcccgatgactgctatgccacgatccccaaccagctcggcatcgacgacttcgacctcgccgatgcgttcggcgagcagcgcgaatacctatgcagcgccgacctgcgcgagttcatggccatgcatcacctcgaccgcacaatgggaacgccggtctcttccaacggcggtcacgcgcatagcgccggattcggaacaaccgttgcccttcccacccgtttcaacccgcgcaaggccttcggcaccgcgacgccgaaggaccatatctacaacacgccgcgtgcctggtacatgcaacgccgcctcaaccccagcgaggactgggattcgccggccgcccgctacacgcccgaatccgacgacatcccgtggtgccgcgtgccggaagacaaggtgagcctcgaagacgttgatttcctgctgtcctcgcacttcgaaggcacgccgtacgacccgtacggcacgaccggcacggcggaatcgcgccaccgttaccgtccgatcggcgtgaaccgcaccggccatatggtggcgattcaggtccgcccgtatgtgccggcggccaatcgcacgatgatgtgggtatcgttcggctccggtccgttcaccgccgccgcgccgttctacgcgaacgtcaacgacacgcctgcctacctgcgcgacaccacgcccgaagtctccaccggcaacctgtattggacgaaccgcctgatcgccgtcgtggccgacgcgcattggtatgagacgaaccggttcatcgagggctatgcggaaggcgtgcgcgcgttcgggcaccggctcatcgagcgcacggatgagcagttgcttgctcgaagcgatgccgaatcgacggatacgaatgcatggccgctcgatggcggccacggcgatgagaaggatgtgcagggcgtggcggatgtgctcgaagcggccaacgacgagatggccgactacctgcgcgagcacacaaccaagctgctgaacgacgtgctatacacctccagcaacctgatgcacaacagcttcgcgatgtccgaccgttgggccgagtagcaaaacctcgactggggaagtaatagggatgccctgctgataacgcgtcagcagggcaaaaccacaatccgaatcagttaaagccgacgatgcgttcggcgatgagatagccgttgcgcacgatccagcggccggttttaccgggcagattgagcgcgcgggacatcagctgcgagcgcacatccttgccgatggccggcgaataggcgtcaatcgcatcccacagctcggttttcttaacatagttggccggatcgcgcgagagaatcaggaacactgaggtaacgcacgattcgatcgccaggaagtgaatcatgtaccggtacagcccctccggcaccgtaccgcgttcgggcgtggcctcggtcatcagccgattgacgagccgcaactggtccacacgcttaatcatcacgtcggtctgcacgctctgaccctcgcgcccgatgaagtagtggtagaacggcacatcgaggtactggatgcgcttcacccacgggaacggctggtacgagtaatagaaatcgacgtagaacgtgtgctccggcagcttcagcccggaatcgcgcaccacctgcgtgcggaaggtgagcgcatgcatgatgatgtactgcgccagaccgaacttgcccaggtcatcccagccgagtacacggccggcctccatcacacggcggaagttcactacggtcttgtgacgcttggccaccttgtcatacacgtaattggtcaccagcatgtcaatcggttcgtcggtgtcatgctgtgcacgcaacgtggccagaaccgtgtcgatggcctgcgggtcgacccaatcatccgcatccaccactttgacgtacatgccggtcgccgccgcgataccggtgttcaccgcgccgccgtggcccttgttctcctgatgaatcgcgcgtacggcgcccggattggtgcgttccagcttgcgcgcgtactccagcgtgccgtctttcgaaccgtcgtccacaatcagcacctcgaggtcgctgatgtcgcttgccgaaagcaacgagttcacgcaacggtcgaggtaggactccatattgtatgcggggatcacaaaggtgagcgtctttgccgtgctggccatgaaagtcttacgtcctcacatatttagtcgttatgttcagtttcctgttcaaaccgtagcacttcgtctcccgactcggcagagtgttgcgtaacctgtgcccctgaactcatgttctgcaaccctgaatcttccccggtggcgtgctcgggatccgattgggcagaactcgtctggtctgaatccgggctgccggaatcggactcgcgcttggctcggcgctcggcctccttccgcgccttggcgccctcaaagaacaactggggcttggagtcaagccggctcaggccatgccaggccaaatccacaatgtatgcagccagctgctccttgctcacctttggccggtcggcccagtactgcccggtgaatacggtcatgcccaccagcatctgcgcgtagtacggcacgcccttggcagacagcttctgccgtttgaatgtttcggaaagaatgtcttcaacgcgtacggcgatgtctcccatcagcgagctgaatgagccggacgggtcggtgctcggcgagtcgcgtaccagtacctggaacccctcggcattctcttcgatataggtgaggagcgcaagcgccgtgcgttccacaatctggcgcgggtgcacggtcggatcgtcgagcgcggcggtcagcgtaccggtcagcgcgcgcatctcacgatccacaatgacggcatacaggccctctttgccgccgaaatgctcatacacaatcggcttggagactttggcgtgcgcggcgatttcctccacgcttaccgcttcgaagcctttggcggcgaatagcgagcgtccgacttcaatcagctgctcgcggcgctgcagcgacgtcatacgtgaagaatgtgccatgcggttcagcttaagtcgccgggtggaattgtcggcctgagactgccgaattcgtaggggattccatctgcgggctagacttgacaggtatggatatgaatactgtgctcgccgttcttggcgtgattgtggtggcggttatcgtaatcgccctgagcatctggttgggcaagtcccgcaagcgcgatttggatcgtgcgatgggcaaggttgcccccgacaacaagaagacccgcgacgccaaggccgccgccgacgctcggctggccgccgaagccgaggaagctaaggctgcgactgccgccgagccggccaagtcagccgaattggccaaagccgagcctgcgccagccgcgcaggccgaacccgaaccggcagctgcgcccaagcccgagtcccaacctgcctccaagcccactcccgccaaacctgaaacccccgaatcggtcggctctcgactgacccgactcaaggcaaaacttgccaagtccggcaacccgttcggcaaggccctgttcgacatcctcgccaaagacaatctctccgaggccgattgggaagacgtcgaagacacactgctgcttgccgacgtcggtgcggatgcttccgcccaactggtcgatgacctgagaaccgacgcccgcatcactggtaaagccgacccagccgaagtacgcgccacgctcaaggagaagctgctcgatctggtcggtcgagatacggaccgccgcctcaatgccgaaaagccgggtgccgccaagcccagcgtcatcatcatggtcggcgtcaacggcaccggcaagaccaccactgccggcaaactggctcgactgttcgtggccgaaaacaagcaggtcatgatgggcgcggccgacaccttccgcgcggccgccgccgaccagctcgaaacctggggcgcacgcgtcaatgtgcccgtcgtccgctccgacaaggacggtgccgacccggcatccgtcgcctttgaggcatccgccaaggccaaggaagcgaacgcggacgtgctcatcatcgatactgccggccgactgcagaacaagtcgaacctgatggacgagctcggcaagattcgccgtgttaccgaaaagaacctgccggtggatgaagtgctgcttgtgctcgacgccaccaccggccaaaacggcatggcccaggccaaggtgttcgccgaagccatcggcattaccggtgtggtgctctccaagcttgacggttccgccaagggcggcatcgtggtcagcgtgcagaaggagctcggcgtgccggtcaagctcgtcggtcttggtgaaggtccggacgatttggcacctttcgatcccgaaggtttcgtggacggcattctcgcgtagacggtcgagttcttctcagtctcgctttgctcgacagctcccctcagcgaggggagccctgcgtccgtccacgttgtgggcgcgggaaacgcccgcaacgcaccaaacctagccccgaagcatattcgaaacatgattcggggctttcccatatccgttggaatcatgccggaatcagcccatccgatgccaacctaactgtcaggtgcgcttaacaatcgcgtaacttgccgtaacgaaaccaaaacgagaccggcttttactgacgaactgttagcccccacaagggggacggcattgtagagacaaagtcgacgccggccgcgcaaagcccccggtgccctgaacgaaagagagggaggtagacatgggagcgattgattccggtaacaccgcatggatcctgacatccgcgtccttggttttcctcatgacgcctggtgtggcgttcttctacggcggtatggttcgtgccaaggccgtcctgaacatgctgatgcttgaggcggccgccctgtcggtcaccatgattatctggaccctgtggggttggtcgattgcttacgccggttccgacatcggaggcatcttcggcgacccggccagcggcttcctgctgaaggactccatggtcgcccaggacggcgtgttcaccgccaccggtctgaacggcaacaactacccggtttccgtggacgtcgccttccaggtcgctttcgcgatgattaccgtcggcctgatctgcggcgccattgccgagcgtgtgaagtacagcacctggatgattttcgtggcgctgtgggtcaccttcgactacgctcctatggcccacatggtctggaacggtggtctgctgtctgctgacggcgccatctccaaggccatcggcgcggccgcccacgatttcgcaggtggtactgtcgtccacatcaacgccgcagtcgccgccctgatcatcgtgctcatcatcggcaagcgtaagggcttcggcacgcagccgttccgcccgcacaacgtgccgttcgtgatgctcggcgccttcctgctgtggttcggctggttcggcttcaacgctggttccgccttcgccgccaacggtactgctggttacgcttgggtttccacctccgccgccaccgcagccgcaatgctctcttggggcttcaccgagaagattcgctccggtcactacaccgccatgggtgccgcctcgggtatggtcgccggcctggtcgccatcaccccggccgccgatgtggtttccccgctgtgggccatcgtgatgggtgccatcgctggtgtcctgacctgcctggcctgcggtctcaagttcaagttcggctacgatgactccctcgacgttgtcggcgtgcatggcgttggtggtttcaccggcaccatcctcatcggcttcttcggtgaaggcaccggtctgctggctggtggcgactggaagcagctcgtcgttcagctggtcatcgctctcgtcgccatcctctactccgcagtgatcaccgcgatcatcgccttcgctctggagaagaccatcggttggcgcgtcaccgaagctcaggaagtcggcggcatcgatcttgccgaccagggcgaacgtgcttacgattttgctggtactgccagctccgttctcaaggaggtgaagtgaaatgaagctgatcaccgctatcattcagccccataagctcgacgatgtcaaggaggccctcgcggccgccggcgtgcacggtctgaccgtgtccgaggccaacggctacggccgccagcgcggccacaccgaggtctaccgtggcgctgagtacaccgtggacctgattccgaagattcgcgttgaagtgctgtccgatgacgcggatgctgaaacgctggtcggtgtgatcatcaagtccgccggcaccggcaccatcggtgacggcaaggtgtgggtcgctccgctggactccgtggcccgcgtgcgtaccggtgagaccggttccgccgcgatctgataacacagacgtccatgcctagaaggggatggactgcataggaaaggtccccgcacgccgcgaattgacgccgtgcggggactttttttggcaatgaaagatgaagcaatgacttcagcagtagatggcttgaaacaacgattcatggatatgagccagccggatgacgacggcgtctaccggaatggtgcgaccaagcgcaaagcccgcacggaactggccatgcaatgcctcactgagctgtggaatgcggcctgcaaggatgtctctttccccgtgcccgactccggcatcggcttcgccgcggtaggctcgctggcacgtggccaactgggccccagctccgacctcgacctggtcatcatctacgagcctcgcacgttgaacgaccagcagctcaacgagttggccaacaaactctggtacccgctatgggacagcggtctggacctcgaccactccatccgcacgcgcgcccaatgcgaggaagtcaccgaccatgaccttcccgccgccatgggctggctggacgtgaagcccatcgccggcgacaccgctctgatcaccaccaccgccacgtccatcctcgaacgctggcgcaaggccgcccgcaagcgcctgcccgaactgctcgactccgccaaagcccgactcgacgaattcggccggctccaatacgtcaatcagcccgacatcaaggaggcccgtgggggtttgcgcgattcggtgctcgtctccgcgctcgccgcctcatggctggccgaccgcccgcacggcatttacgacgaagctgtggaacgtctgctcgacgtacgcgactgcatccatctggtggccggcaaggataccaacctgatgctgacgccctatcaggccaaagtggctgccatgcttggccttgccgatccgacttggcccgaaaacgagcgtgccgcctactcgatcgacgatttgcagacgctgcttgcccgtatcggccggcgcatctccttctcgcttgattccaccgcatcccgcgctggacattcgctgacccacgaaaagccgcgattcgcgttcttccagatgttctctcagcgctctggcggcaagcgtgaagccccgcaattcgacgtggtggctcccggcgtggccaagcacgaaggcgaattggtgttggcacccggtgccgagcctgccaaggatgccaagctggcgttgcgtatggccgtggcggccggcgaattcggtttgcccatcaacccgtctaccttggttaatctgaagcactgcccgattcacgacaaccagtgggatgacgaatcgcgcgagctgtttattcgtctgctcgcatgcgggccgaatcttatggaagtgtgggagagcatcgacttcgtggacattccgggtcgatggatgccggaatggctcggcgtccgcaaccgtccgtccgcctcggccgcccaccggtacaccatcgatcggcatatggtggaggtcacgtcgcgtctgggtcgtgagacaccgtccgggggacggtatgatgacgatcatttcaaggcgttgctgttggccggtattacccatgacatcggcaagcgcgcgttcgtggccgatcacgccgccgagggtgcccgccatgtgccggtgattctcaagcgtatgggctacgcgccggacatcgtcgactgggccaccgtgctggtgcgtgagcatttgaccctatccgaatttgccacgggtaaggacccctatgatccggccgtggcggaggagttggccgaccgcttgcaccacgacaagatgctgttggatatgctgttcgacctgacccgggccgacggctcctcgctcggtgccaccgccggtgagaccatcaccaagcaatacggctggtccaagtggcgcgaacaaatcgtgcgcggcatgtattccgccgcccgcgccgcgatgtaaacggaatcgcccagcacttcgcgcggccgatacctacttcatccatgcgtccgagcgcacgcgcagcccgttggacaggccgcgcccgcccatgagcaccacgttgaacgcggcccagagcacggcggtacgcatcaggtcgctcgtcagcgccggcgtcaccatattggccagtatgagtatgagcgtcacatacaccacggcggtcagcgtgcaggtgcctgccagatagcggtagtcgcgcgcgccgataagaatgccgtcgattgccatcatccagccttgcagtgggaagaagatgcccatcgtcaccatgccaacggcaatcaacgtctgaatatgtggcgtaggggagaagaagtgcccggcgaacaggccgactaccgcaaaagccgtgccgattaccgcgccggtgaccagccccgcacgcccggtcgcccgcgtcaaccgccgcgcctgctgcacgctgccagcgcccagcgttgtggccaccagcgtctggccggcgatgcccacagaatccagcatgttcatcgcaaaattccaagaggagttcacggcctgaaacccggccaacacggcagtacccatgcgcgcggcacaggcgaccgtagccaccatggccgcacgaatcgccaatgtacgaatgaacaatggcagtccgtcgcccccggctgccgcaataccggccaaacgaggccgcagactcgcaccgtccgcccgggaccacagaatggcggggattaccaggaacagccccatgaaccactgagctatcagcgtcgccactccggagccggcaatgccccaattcagcacaataacgaacaacacatcaagcgccgtgttcaccaccgcgccgcccaccgcagcgatcagcgtgatacgaaccttctgcaatcctcggaaaatgccgttcgccgcatataccatcagcatgcctggcgcacccagcacgattgcgcgcgtataggtcacggcttgttccaatacttcgccctgaccgcccagtgcccggcataatggctcggcagccgcgaacaatcccaatcccagtacggtgccgatgctcaaggccagccacaggccgtcaatgcctgcctgcagtccctcgcgacgacgacccgctcccagcagatgcgccacctgcgcagtggtcgagtaggccaggaatatgcatagtccgactgccgtgaggatgatggtggagccgattgacaggccggccaacgccgcatccccgatatggccgacgatggctgtgtcgataaggatgaaggtcggttcggcgatgagctggccgaaggtcggcagggccagcgccatgatccgacggttggtggagcgggcgtcggtcgggccgttgctggtgtttgtgtttgcgccggcatgcggggttccgaagccatcgcggcgtgtggtatcgccggaactggtggctttggcgtcggaagagtctatgtgcacgctcacacgcatatcacgcctgactacattgcgcaagcacctgttgtggacgcggaatgttatccccagactatccaccaagttatccccagtatgtggataacttagtggattatccccagaattatccccaaaatgtggataacttatttttctatccacattttgctttctgcgtgtcgcggcgctgactcataggtgaatgagaaatgaaccgatgcgggcaaccgtttcgtttccatacgatatcgttcacctgccacgccacctcctatacttgaaggctatggcagaaggaagtgaacactcgtatcagaatgggttcggcagtggctcggatcgtggcgatcgtggcgaccgcgcgggccggggcggcgcgcagacgtcggcggcggtcggcgacccgattttcgaccgagtgcccccgcacgatgacgacgcggaaatggccgtgctcggcggcatgctgatgagtaaggatgccatcggcgaagtttcgcagaccattgacgtcaccgatttctaccagcccaagcatcagacgatctataacgcgatcatcgatctgttttccgccagtcagccggtggacgtggtgctcgtggccaaccagctgttggcggatggcaacctcgacaaggtcggcggcgcggactatctgcacagcctcgtcgcatccgtaccgaccgccgccaatgccatgtactacgcggagatcgtccatcagcgggccattttgcgcaatgtgatcgccgccggcaccaaaatcgcccagctcggttattccgccgagggatcgcaggctgaggatgtggttaacctcgcccagtccgagatctacgagatgtcgatgggcaaggtgcgtcaggactatgccgccatcggcccggtggtccacgacgcgctcgaccagctggacaaactgcagcagggtctcgtcaacaagggcgtgccgaccggattccgcgacatcgacgacgtgacccagggcctgcagcccggacagatggtcgtcgtcgcaggacgtccggccatgggtaagtccacgctcggcatcgacttcgcccgcgccgccgcgttgcaccacaacatgacttccgtggtcttcagcttggagatgagcaaggtggaactcgcccagcgcatcatttccgccgaaaccaatattccgatggccgccctgcgccgcgccgacgacatcacccccgaacgctggaacaccctgaaccagttctggaccaagatgcagaacgcgccactgttcattgacgacagcccgaacatgagcctcatggagatccgtgcgaaatgccgtcgtctgaagcagaccaacgatctgaaactcgtagtcatcgactacctgcagctgatgacctcgggcaaggccgtggaatcccgtcagcaagaggtgtccgaattctcccgtgccctgaagctcttggccaaggaactcgaagtgccggtcgtggccctttcccagctgaaccgtggcccggaaatgcgtaacgacaagaagccgcagctctccgacctgcgtgaatccggctcaatcgaacaggacgccgacgtggtgttcctggtccaccgccctgacttctacgacaaggaagaccgccccggcgaggccgatatcatcatggccaagcaccgtaacggcccgaccgaaaccttccacctcgccttcctcggtgccacgtccaaattcaaggacatgccgcaggactacaacagcaatcagggggtgtgatgatggcaagcaacgtttcacgcgatgtctcgcaagaccaatcgtccgtggtgcagacccgcaaaccgtggtatgcgttcgccaccgtggccgcaggccgcttcgtgcggtttgcatcccgcgtcaccaaacatggcggttcggctttgcccggcaaagtcgtagaaaagattgaccccggcttcctgacccgtacgctcgggcagttgccgcttggcgtggtattggtgtccggcacgaacggcaagaccaccaccacccgcatggtcgcctcgatgctctccgatctgggattgaaggtgttcaccaatccgaccggctcgaacttcgtgcgcggcgtggtctccgcactgctcaccgaagtcactttcggcggcaaattggacgcggacatcgccgtactcgagctcgatgaggcgtacgccgtccacttcgtcaagcaggtcaagccccgttatgcgttgctgctgaacgtgatgcgcgatcagcttgaccgattcggtgaaatcgacaccacggccaaactgctcagccatgtggctgcggcgactaccggcactgtggtactgaaccgcgaggacccgcgtatcgccgcgctcgccgcgaaggccccggctggcaccacagtgcgatacttcggcctcaccgacgatttgcgccactatttcccgtccgatgacgacatggccacgaccgtgtcggtggaaggtatggccgggccgctcccttcagtcagtactcccctcagtccgcttcgcggacagctcccctcggagaggggagcttccgcaggcacggcagaactccccgccgacgtgacacttaccgccgtgggcgaccacaaggccaccttccagatggacagccaggactacgccaccgacgtcaaacttgaaggcgtctacaacctgtacaacgcggccgccgcgctcgccgtggtacgtgcggtgatgcaagacaatgccgccgcatccaaggccactgccgcagccaacgcctgcgccgtgtccgccgacgagctcatcgccgccgtttcccgcgtcacgccggctttcggccgtggcgaggtcatcgacgtcaacggttccccggtcgaactgctgctggtcaagaacccgatgggcttccgcctctcgctcgccagcttcgacccggccaacgcggacaccatgatcgccatcaacgacgaatatgccgacggccgcgacatgagctggctatgggacgtggacttcacctctttacgcgcgtccggtgtcgccatggtctccggtgtgcgtgcctgggacatggcattgcgcttggggtatgaccaagtgccagtcgccgatacgaacaccgacctcgaacaggcggtcaccgcattcgtcaacgccaatcccggcacacgcaagcacatctactgcacctacaccgccatgctcaaaacccgtgccgtactgggccgcatcaccgaagtacgggatgcgggcgtgggcaagtaaccaccctctagcgcccgcgcgccacctctcgcctgcgggaggacatggtgaggaataagacgcttccccttagcgggaagacatcgacaaggagaacgcgacatggccagaacaattgatgtggtgtccctgtatcccaaagacatgaacatctacggcgattccggcaacgtgctgactatccgccgccgtctggaactgtacggttacgaaccggtcgttcaccagtgcaatcaaggcgacgattggcccgaccaggtggaccttattctgggaggcggcggccaagacaccggccagaagaaaatcatcgacgacttctaccatcgcgccgacctgctgcgttcgcttgccgcagacggtacaccgatgctgatgatctgcggcctgtaccagctgttcggcgagtatttcgagactgtggacggcacccgtctggacggcatcggcgttatcggtgcttataccgtgggccagaacgtgcgtatgatcggcaatcttgttgagcattccgaccagttcggcgatgtgatgggctatgagaaccactccggccagaccttcctgcgcgaaggcgttcagccactcggcaccgtcgatcaggacggccgaggcaacaatggcgaagaccataccgagggcgcgcgcgtgcacaacgtgatcggcacctacatgcacggctcgttgctgcctaaaaaccccgccatcagcgatttccttatcgaaactgccgtgactcgtcgttacggtacgttcgatacgtccgatcagacccccgatcaagccaaggagctcgcccggctcgatcaagtagccaccaacgcgcgcaaggctgccgccgaacgtcctcggtgaattctcggtgagtcctcggtaagtaccaatcagcgaaaaatcagtcgaaatcagtctgagggtctagtacattgccctgttgtttgcgctaggcttggtggtacgagacatggcaccaggccatgtcggacctcgaaggaggggtatcatggctgattttgatcttctgggtgatggcctgcgcaaggtcctgctggcgggcatcggcgcccttgccaccggatatgagaagagcagcgagctcgtcgacgaactcgtcaagaagggtgagattacggtcgagcagggcaaggcgctgaacaccgagctcaagcgcaaggtgagcgagacggtggatgacgccaagaaggccgccgccgaagccggcgacagagctgctgccgcagccgacaccagtgccgccgacaagcccgctgacgagggcaaggccgagtgaccaagctcacacgcactacgccggaatcagggtcgaccccgctttccaacagggtcgaccctattctgacgcctgcgaaagccgaacgtgaggcggcggcgaaccggtccgtcgacacgtcggacacgctcaagcagaccgttaccaaggcgactccgagcgtatccgacgaaacgctggcattgttcggacgcaggaacgatttcgccacgcgctaccatctgacgcgccgtggcaagatcaaacgactggggcagatcaccagaatcgtcgagcaattcgacgtgctgcacggcctgactccggtcaaaatgcgcctcatgttcgaggcgctcggccccacgttcgtcaaagtgggccagattctgtcgatgcgctccgagattctgccgcaaagcttctgcgacgaactcgccaaactgcgcgccgacgccgacccgatgccgtattccacggtgttggatgtgcttgccgccgaatacgggcgtcccgccgacgaggtgttcgcgcatatcgatcccaagccgttgggctctgcttcactggcgcaagtgcatcgcgccacgctgaaaaccggcgaagatgtggccattaaagtgcagcgcccgggtgtgcgcgaaaccatggctcaggacgtctccatcatgcgctccatagccaaggccgccactaaggtgattcgcacctcacagatcgtggacctgaagggcgtggtcgaggagctgtgggacaccttcgaatcggagactgactttctgattgaggcccgcaacctcgccgaattcaagcgtttcgccgcccgattcaaatacatggactgcccgacggcgtacaccgaactgtgcaccgagcatgtggtggtcatggagtacatcgacggcatctccgtctcccacccggcccggctcgtcgatgctggttatgacttgaaggagatcggcaccaagctcgtcgacaattacgccacgcagattctcgacgacggcttcttccacgctgacccacatcccggcaatatcatcatccggggcggccagatcgtacttatcgacctcggtatgaccggtcggctcgaccagcgcacccgtgcagtcctcaaagaaatgattttcgccgtcgccaaacaggattcgcccgctctggccgaggggctgctgcgatttgccggcaccgaggccgatccggagggctacccagcactgctggctgatctggacgtgatcgtcaaggaattcggcactgtggatctggccgaactggacattgccgccttcctgaccgcactgacgcagatggccggccgccacaacatcgaggtgcccagtacggtgaccaccgtcggccgcgcgttggttacgctcgaaggcttgctggacgagttcattcctgatgtgaatatgatcgaaatcatttccgaccatatcgccacgtcgaaatcgctgaagaacgccaccaaagacgagatcaagtcgctgggcgttgagggacatcaggctttgcatgccacgctcggcaccatgaccgaactcaagaccgtggcccgtatgctgacccgtggtcagttgcgcgtcaacatggaactggtcggctccgaagagccgttccagctgctttcggatatggtgaatcgtctgacgatggccctgattgtggtcggtttgttcgttggctcgtcgattgtctactacgccggcatgaagccgattatcttcggcattccggtcatcggcttcatgggctacgtcgtggccttcgccctcggcgtatggatcgtcatcgacatctacttaaaggggcgcaaaaccaagaagcggtagggcatcgattgatatcagtccagcgggagggtggattcgcgctggataaggtggcagggtacgtagtcgacaccgtgatgcgggttgccgtcgatggcatcgaccaagtatcgtgccgcacgccgtccagaacgtgctgcttggtttcttcgctaatgcggggcttgttgtgcagtgccttggacgcagtggccaaagagactcccgccaaggcggcaacatcttcgagccgcgccgcgcgtccggtcaatgtctgggccatcatgcctcgattctacttttgcatttgtaatactgtttggctgactttactgttgaggcaacagatgcgggcgcgatagcgggtgaagaatcacagcgtgactttcgcccgctgttatccaatgatttcagcgaaagaacaacgataatgctcagcaataacgcggtagtggtgtacttctctcgtactggagagaagtactcagtcggtgagatcgaagtcggtagtacagccaaagtcgcgcagaacgacgctgacgccactgcgcaggccgtcgagaactggatcggatagcgatggcgaggtttgttgtcaatccggtgacgcattcaagcgtcattgcggtctcagtagtgggacgcaactgcgaattggcccatattgcagttgcgtcccactcttatgtggggttctcgattgcgcttaaccgcattgagcggcgtatcaggcggcgtgtcaggcggcgtgtcaggcggcgagcttggccttgtagtcttctccccagttccatagagcgtcgatgacggttttgaggctgtggccggtgtcggtcagagagtattcgacgcgcggcggcacttcggggtaaaccttgcgatgcacaagtccgtcggcttccatctgtcgcaggttcgaggtgagcaccttctgcgagatgtgcccgattgagcgacgcagttcgctgaagcgcttggtgccgggcagcaggtcgcgcacgatgaggattttccatttgtcggaaatcagtgtgagcgtagtctccacgggacacgccgggagcgtgtcgacatcgatcatagcatcacctcgtgtaatcgttggaatcatgcaatagttccttctaggtgactatggcactttaaagtgccttcttcccaaaaagtaagtactccaataacgtaccgttccaacggcggaagcaccaggctccgccgttgaaatcaattgggcacagcgtgtaacaagcgcaatggattaccacacaggagcccatcatgacccagaacatcgcagttatcgcagccaacggcaagtccggccagctcatcgtcagggaggccgttgatcgcggacttgacgtgaccgctgttgtgcgcggggagaacaaaaccgtcgcccggcacgccatcatcaaggatctgttcgacctgaccgcagcagatctcgccggattcgatgtggtcgtcgacgcgttcggcgcatggacgccggaaaccctcccgcggcactccacgtcgttgaagcatctcgcggacgtcctctccggtgccgacgcgcgactgatcgtggttggaggtgccggtagcctgtacgtcaacccggagcataccgtgcagctgagccaaaccgatggcttcccggagtcgttcctcccgctcgccaccgcgatggggaattccctcgccgaataagcagcaccccgaaatcaaaacgatttcggggtgcttgtgcgtgtgggcaagaccccaaccttcatggcgactcaggcctgctgccgcttggaagattcagtacctcgccgaggatggttcttggaaggacgtcgagcccactgaggattacaccatcgtgcgtaattcgccggcttctcgtgcggataccgatgccaagggttggagcactgtgaccttcaagccggtcaccaccaagtcgctgcgacttgtgctcactccgcacaccggcagcagcaccttcggggccgccgtggccgagtggggttgcaaccagttaacttaattgcttgctttcgattgttttcgtatgatatacttgagtcatgcgtgtcagggaatgggcgaggcgtgagggcttcaacgagcagacggtatggcagtggtgccgtgagaaccgcatgcccgtcccatttgagcgcatgagcacgggcacgataatcatccacgacccgaaatacgagaaccagcccgccgcccccacggcgaacggcaggacggtgtgttacgcgcgtgtcagctcgtctgaccagaaggacgatttgacacgtcaggccgaccggttgagggcgttcgccatcaacatgggcgtcgagaagcccgaggtggtcacggagacgggttccggcatgaacgacaaacgacgcaagctcaaccggctgttggccgacccgaccgtgggcacgctgatcgtggagcatcgcgaccggctcgcccgcatgaacgcgggactggtggagagcgcgttgaaggcgcagggacgccggatcatcgtggtggacgacacggagccggacgacgatctggtgcgcgacatgaccgaggtgctgacctcgttctgcgcgagactgtacggacgccgcgcagccaggcaccgtgcggagaaggcgttggaggcgatgcgcgatgaacgcgtatgaggccgtcaggattcggctcgacccgaccccacggcagacacggctgttggagtcccatgcgggtggtgcgcgtttcgcgtacaatctgatgctcgcgcacgtccggcgccaaatctccttgggtgagaaaccggactggacgttgtacgcgatgcgccgctggtggaacgagtggaaggacgaaatcgccccgtggtggcgggagaacagcaaggaggcgtacggcagcgcgtttgaatggctgtcccaggcgttgaggaactggtcggacagcaggaagggcaggcgcgcgggccgtagggtgggctggccgaaatacaagtcgaaacgctccggtgtcccgcgtttcgcatacacgaccggcagcttcggccttatcgaggacgacccgaaggcgttgaaactgccacgcatcggacgcgtgcactgcatggagaacgccaccgaacgcgtccacggcagacgaatcgtgcgcatgaccgtcagtcgccatgcgggcttctggtatgcggccctcaccgtcgaacgtcccgccgaaagcgttccggcgaaaaacagaaaacggaagaaccatgatcgtcaggtcggcgtggatttgggcgtcaggaccctcgccaccctctcggatggcaccacgttccccaatccacgcaaccacgtccgcacgcaacggaaactccgccacgcccaacaggcgttaagccgccgcgataggggcatgagccatggatgcgggtcgaaacggtacaacagggcgttggggcgtgtgcgccgaatccacgctcgcatagccgcccaacgagccgacaacatcggcaagctcaccacgtggcttgccgacaattattccgacatcagcatcgaagacctcaacgtgcagggcatgagccataacaggaggcttgccaaacacatactggacgcggacttccacgagttccgccgccaactggaatacaagaccgcacgcgccggcacgaggctccatgtcatcgaccgctggcatccaagctcgaagacctgttcgaactgcgggacggtgaaagccaaactgcccctgtccgaacgcgtctaccattgcgaggagtgcgggcttgtcatcgaccgtgatgtgaacgcggccatcaacatccaagtcgccgggagtgccccggagacgttaaacgcgcgtggaggaagcgtaggacagacccgccttgagtgcgggacaatgcggcatccggcgaaacgcgaaccaagcggcggcgacagtcgcgtgagacttggagctggtctcggcaacgaggccatgcagatgacttcgctctagcgacaagctaaaacaaagtcatctacaacggcgtgcatggtattgacggcaccgagtctgaacctaccccggtcgacaagaccgtgctcaagtcggcttttgatacagccaacggcctcgatgcaagccgttacaccgccgcttcatgggctgagttccagcgaatcattgacgctgcccaggctgtgtacgacgatgccaacgccaccgaagaacaggtcgccgagcaggtgaccaagctcgaggacggccagaaggcccggctcccagcagcccggcgtgaccgacggcaagcagaacgacaacaagggcagcctgaccaacacgggtgcggctgtgctcggtgtcggaattttcgctgtgctgttcgccgccagcgggggcttaactttgttcaataacaagcactatgtgcgattatgcggctacgatggtggaaaatacaacgacaggggtagcaatgacggcatatatggatcataaagacctcgcaaatgaggttatcgagcagtcgcgcgcgcgtgaaatcactgacggtgtacatcgggtacttgaccgcatcgccgaagccgaatcagtcgccgggcgtgaagccgggtcagtgcatctgctggccgccaccaaaacccgtgatgtaggggagattctggctgcaatcgacgctggtgttcatagaatcggcgaaaaccggccgcaggagattatcgtcaaagcgccgggactggcccggctgctgtccgaacgtgggtattcattgggcgtggttgagaccgagggaggcgccgcggccgatgctgcccaccacattcccttccatctcatcggccaattgcaagccaataaaattggcaaggtgctgccggtagtggacaccatcgaatccgtggattccatcgaactggcggaaaagatcgcccgccgtgccaccatgcgcggcatcacggtcggcgtgttgctggaggtgaacgaatccggcgaggaatcgaagtccggctgtgcacccagccacgccatcgacttggcccagcgcatcggtgcgatgggcggactgcgcttgcagggattgatgactattggtgcccatgtggatgatgagcgcacgattcgtgcgggcttcgcgcatctgcgccgcactcgtgaccagattcttgcctccggtgccgaaggcacggccgactgcaccgaactgtcaatgggcatgacccatgacatggcctacgccatcgaagaaggctccaccatcgtgcgcgtcggcaccgccatcttcggcgagcgcgccttcatctgattggagctatacgaaaaaacaccgcttgatcaatagccaagcggcgttttttcgtaaggattttcggcgtatcaatcacgcatagatattgcgcggacgcatgtcctcgggcaggccgtcgagcagaatcgccacggaaccttcctcgaacacggagcgaatacccgcggccagcagcggtgcgcaagacagtacggtcatattcggcaggcgcttctcttcaggaatcggcacggtgtccataaacacgatttcatgcgcgccacagttggccagtcgctccacggccgggccggaaagcaagccatgagtggcgaccaaggtcaccgacttggcgccggattcgttcagggtgcgcacggcttcgcagatagtaccggcggtatcgaccatgtcgtcgatgaccacgcagtcgcggccgtcgacatcgccgataatgccatgtgcctcggcatggttcggacgagtaatatcacgctgcttgtggatgaacgccagcggcagattgcctagcttggcggcccactgttcggacaccttgatacggccggcatccggggacacgatggtggtgttgcccagatcaagggtggaacgcacgtaatcgagcagcaccggcatggcggttagatgatcgaccggaccatcgaagaaaccctgctcctgagcggcgtgcagatcgaccgtcataatgcggtctgcaccggcggcgtggaacagatcgaaaatcagacgggcggtgatgggctcacgaccgcggtgcttcttatcctggcgcgagtagccaaggaagggcgccaccacggtaatcgacttggcggaggcgcgcttcaaagcgtcgatcatgatgagctgttccatgatccacttgttgatatcgcccgaatgacactgcagcacgaacacgtccgcaccacgcaccggttcggtgaaacgcacgtacatctcgccattggcaaagtcataggacgtggtttcgaggatttcggttcccaagcattcggccaccttctcagctagctcggggtaggcgcggcccgtgaccaatacgagtcgtttatccggagtgccttcaagaatcgccgacatgcgttcgcatcctttgtttgagtcgctgtgtgatttacgccttaaccagtgtacaagcaccccgccgcagcgaacgccacggcggggtgcttatttcgtaagagtgttgagattgccgaaatcactcggagaactcgacactgaccttattgtctttgatggtgaagttgccgttgacctccttgccttcaagcgtgtacgtcagctgggcgctcacggtgccatcggcattattggaggtctgcgagatgcgcgcgttggtgatgcgcgtgttctcgcccgaggatgccttgctggtcagcagtgcgcgctggttcgtattcacgtgaggatcggcgatggtgttggccttgtcgtagttgccggaggagatggcggccacatagctgttcgcaacgctcttcgcgctgaacacggcggaagacagcacgccatacacgataccgaacagcacgaggaagccggccacggcaccaacgatgatgaagattttcttctgttgctcattcatggtggtggaggtcgcgtcaggtgcggctaccggtgccgctccgggagtgatgggagccgcgggctgcgtgggcttggccaaaacggtgggcatcgcgaaaccggcaagaatatgggcataccctgtcccgcctcatatatagactgtccaagttgcccgaagaggcggtgccggtttggtgctgcgtcatgggctaacacgcatacacactcctgccacggaacgtccgtggccgaatagtccgaaggaggtgggtgatgtctgcgcacaagtacgaactgatgttcatcgccgatcctgagctggatgagcgcggtctgaagaagctgaccgagcagtatctggaactcgtcaccaaggaaggcggctctttcgatgagcccgattactggggccgtcgcaagctcgcctatgagattgccggtaagaccgaaggcaactacgtcgtggtgaagtacaccgccgagcccgctaccagcgatgagcttgaccgtgttctgaacctcaacgaatccgtgatccgtacgaagattcttcgtaagggctgaatcaagcgtttagtcagctgaacagctggtattcaaggtaagtaagaaggaccgttatggcaggtgaaaccgtcatcaccatcgtgggcaacctcactgcggaccccgagctgcgcactattggcagcggtgcgaccgtggcgagcttcacgattgcttccaccccgcgaacctggaatcgtcagaccaaccagttcgaggatggtcaggcgctgttcatgaggtgctccgcttggcgtgatctggccgaccactgcgcccagtccctgaagaagggcatgcgcgtgattgccaccggtcgcctccagcagcgttcctatcaggcacaggatggttcccagcgaaccgtcgtggagatgcagctcgatgagatcgggccctccctgcgctacgccaccgcacaggtgactcgccagtcgtccggtcagggcggcttccagggtcgttccggtggtttccagggtggtcagcagtccaatcagggctatggcaaccagggtggccaaggtggttatgccggtggccagggcggttacaacggtggctatcagggtggtggcgctggatactcccagcagtctgccgctcccgccaacccgtccgctcctgcggtcgacccgtggagtaatgccggtgcatctgatgccggtagcttctccacgttcggcgcttcctccgatttcggcggcgacgattccgacccggagttctgatcagtacttgcctccccgctgccagcagcaatcaatatcaagatttataaggagaacatcatgtcacgtaagaggccgcaaccgccggtcaagccgttcaagaagaagccgaacccgctgaaggccgccaaggtcaccgagatcgattacaaggacgttgcgctgctgcgtaagttcatttccgatcgcggcaagatccgttcccgtcgtatcaccggcgtgaccgtgcaggagcagcgtgagctgtccaaggcgatcaagaacgcccgcgagatggccctgctgccgtacgccacctcgggtcgctgagttagggaggctttgaacaatggctgaaaccaaggttattctcaccaagaccgtgtccaacctgggccattccggtgacgttgtcgacgtgaagtccggctacgcccgcaactacctgttcccgcagggcctcgctttcgcgtggaccaagggcgctgaggctcagatcgtcgctatgaagcgcgctcgtctggccaaggccgtcgctacccgcgaggacgccgtcgccgctaaggccgccatcgagggcactaccgtcgagatcgccgccaaggtgtccgagtccggcaagctgttcggtggtatctccaacgaggccatcgccgtcgctctgtccgacaaggctgcggtgaacccgaaggccatcgaggtcgagaccatcaagaccaccggcgatttccccgccaaggtggccctccacccggagatcaccgcttccttcttcgtgaaggtcgtggccgagtgagtcattccggcctagtgctggaatcacacagaccaagagtctgagcttaagcatcatcccccgtgcggtttgcgccgcatgggggatttttgtattagcaaaaacgccggaaataggcgcgacacgccgagagttgcattcgcttcaaatctgagtatatttatcacctgttgcaaggaatacttcaacatctaaccaagcccctgtagctcagttggttagagcagctgactcttaatcagcgtgtccagggttcgaatccctgcgggggcacagacaaccggaatcgaaagattccggttttttgttttttccagtatcagtccgtagctggtgcggaaaggccgtcttcgcgcgtgacggccggacgtgtaaggagcaacgtcatgcctcagatattcacgttcaccgtatccgaccccgaaggcatgcacgcccgcccggctggccggttggttgccaaagcgcaggaatatgaatcgagcatcaccgttgcctacggtggaaaatccgtggatgccaagcgtatcttcggtgttatgggacttgatgttcaacaaggtgacgaggttacggttcgggtgcagggcaacgatgaagctgtcgctgctgcagagttcgagcgattcctcaaggagcacctgtaatgagaacgatacagggcgtcagcgtatccgctggcattgctatcggcacggtccgcgtgctcgccgccgtagattatgccgtagaacgccgcttaatcgacgacccgcaggccgagatggatcgattccgcgcggcccgtgacacggccgtcgctcagctcaagcaactgcgtgacaacgtcgccgctgagttcggcgaaaacaaggccgaactgttcgacgcccatcggcttatgctccaggacccggactatgcggaatgcgtcgaaggtttgattgcgcaagacaaggtgaacgccgaattcgcggtgaagagcgccgccgaacagttcgccgccatgttcgctgcgatggatagctcgaccatgcaggctcgagccgctgatgtcaaggatgtttctcgccgcgtgatgaacgtgctgcaaggcaaacgcgatagcacggcgcaggatggcagtgtacaaggcgatgctgtgcagaacggtattgtgcagaacgggatcgcgcagaacggcgaaagccacatcatcttcgccgaagatcttgctcccagcgataccgcgcagctcgaccgcgctaaggttttgggcctcgtgaccgccaagggctcagcgaactcgcacaccgcgattctggcgcgcacgatgggcctgcccgccatcacaggtatcggcgacgcctttgacccggccgatgatggtcacgttgccgtaatcgacggcaccagcggtgcggtattcgtcgacccggacgaggccacgctgaccgaataccggcgcaggaaggccgaggctgaggagcacctaagcctcctgcggaagctcaagggcaagcccaccgaaaccaagtccggtcagcgggtccacctgtacgccaacatcagccgtccctctgacgcagccgccgtgctggccaacgatgctgagggcatcggcttgttccgcagtgagttcctgtatctggaacgcgaggactggccgaccgaggaatttcagttcgatgcatacggacaagtcgcacaggagatgggcgaccgtccggtcatcatccgtacgctcgacatcggcgcggacaaacaggtcgactacttcaatctgagccacgaggataatcccgcgcttggttaccgggcaatccgcatctgcctgacccgcccggagattttcaaagtccagttacgcgcattattgcgcgcctcagcatacggcaacatcgccattatgctgcccatgatcacctctgtgcaggaggtacgcgacgccaagcggattcttgaagaagccaaaagcgagctgcgcggcgagcgcatcgacttcaacgagagtatccagatcggcgttatgattgagacgcctgcgtcggtcattatggccgacgagctggccgccgaagtcgatttcttctccatcggcaccaacgacctgacccagtacacgctggcctgtgaccgtcagaacccgagtctcgaacgctttgccgacccgcattcaccagctgtgctgcgcatgatccagatgactatcgaggctgcccatcgtcatggcatctggtgcggcatctgcggcgagcttggcgcagacttgagcctgatcgatacgttcctgcgcctaggaatcgacgaactgtccgtctcgcccaccagcgtcctgcccctgcgcaacgtcattcgcaaccactgagattcaaggtcgcttcggctgattccgatggctttttgggcattgcattcggctggacattcgacatcgcatcttgccggcatttcgtcgtggggcaaagtgtacaatcaccacgtttgctttcgcgcccagcgtaaatcgcgtcgccggctccgcgaacggatttccagtcacacagaatgccgtgaacagtcagccatgcctgttgcgcggcgaagagaaaagaagaagcagtggattatcctctctttaccaagctggccgccgagttcttcggcaccgccattctgatgatcttcggcaacggctccgtggccaacgttgagctcaagaacaccaagggccaccacgccggctggctgaacatcgccatgggctacggcttcggcgtcatgttcccggtgctcatgttcggtagcgtctccggcgcgcacatcaacccggccatgaccatcgcccaggccgtcaacggcctgttcccgtggagcgacgtgctgccgtacatcgtcgcccagctgctcggcgccctgctcggccagctcatcgtctacatcacttactacccgcactacaaggagaccgaggacgccgaggcgattctgggcaccttctgcaccactgacgcggacaaccagaaggtcaactacttcctcaacgagatgttcggcaccctggtgctcgtcttcggcgccctgtgctgcctgtccctggcttggggcaagcaggattacgccgccgcctccatcgtcgtcggcttcattgtgtggggcctcgtgacctccatgggtggcccgaccggccctggcctgaacccggcccgcgacctcatgccgcgtctgctgcacgccatcctgccgatcccgcacaagggctcctcccgctggggcgaggcctggatcccggttgtggccccgattgtcggcgccattatcggcgcttggctgttcgtgttcttcttcgccagctgattcgttgattgattcatatatgcaaatggcctccgctcgttttgggcggaggccattgtcgttgaatcaggtaaacgcagagactactgctccaggaacacctgcggggccttcatgaagttcgtggcacagtgttcgccgcagaagtaataggacttgccctcatactcgcgcgtgatcgcatcggcgttcacagacacggtcatgccgcacaccgggtcggtggcggtttcgccgtccgcgggggcggtgtggtgcatgtgcattcccgtatccatagtgttctccttgttggttggattattggattggtcagatacgtgattggtttgattcagcgtggtgcgatcgtcgatgatgacggtcggctcgtgaggcgcgttggatgtggcggagccggtgatgttggcggcgttggcggattcggccgatccggctgattcgacatccgccgtgctgctgcccgaaccggcgggaccatcggcagcacccacgttgatgttcgctccatgcagccggttcgcgttcagcaccaggcacactgagctcaacgccatcgccagacccgcgatcatcgggctcaacagccagccggtgaacgggtagagtacgccggcggccaccggaatgccgatgacgttgtagccgaacgcccaccccagattctcgcggatgttgcgcatcgtggcattggacaggttgatggtcttgatgacgccgcgcaagtcgccgctcatcaaggtcacgtccgccgactgcatcgccacgtccgtgccggtgccgatggcgatgccgagatccgcctgagccagcgcgggggcgtcgttgatgccgtcgcccaccatcgcaatcagagtgcgggattgtgcggccgtgcgggaggtgccgtacgcggacttggcggcggcctcgtcgcgttcgcgctgcagtttggcgatccagtaggccttgccgtccggcttgacctcgcagatcaccgtatcgatgccgacttcgcgggcgatgcgcccggctacctcggccttgtcgcccgacagcatcaccgtgcggatgccgcgtgcgcgcaacgccgcgacggcctcacgcgagccttccttgactgtgtcctgctcgtagctcggcttgtcccagtcggcggccgcgtccaccacgccgcgcgtgatggtgccggtcttgtcgaacaccacggtgccgatgcgacgcgcctgttccagcgccttggcactggtgaccagcacgccgttggtggcgcccaagcccagcgagaccgtcaccgacagcggcgtggccagtcccagcgcgcacgggcaggcgatgatcagcacactgaccgcagtgaccagcgcgtgcgccagttgcggcgccgggcccagtgacacccagatggcgaacgtccagatggcgatgatcatcaccgccggtacgaaataccgggcgatcttatcggccagttgctgcaccggcgccttggtcgcctgggcgcgggccaccatcgccgcgatctgcgagagtaccgtgtccgcgccgacttgggtggcgcgcatcacgcagtcgcccttgagcagcacggtggccccggtcaccgggtcgcctgcggttttggagaccggcttggattcgccggtgatcatcgattcgtcgatacgcgcctcgccggccacgatcacgccgtccgtgggcacgcgctcgccgttcttgacgatcagcaggtcgccggtgacgatggcgtcgatgtcggtgtccgtgaaatgcgccggattacgccattcgatgccgtccacattgtctgcggaagtggcgttgagcttgtgcgcggtgcgcgggcgcagtccgataagcgactgcaccgccttgccggtgccttcgcgggctttggcctccagcaggcggccgaccagcaccagggtgatgaccacgccgaccgattcgaaatacggctcgcgcgagccctccgggaacacccacggggcgatgcaggtcaccagcgaatacaggtaggcggccgaagtgcccagcgagaccagcgagttcatgtcgggggagcggtgcgccagcgcggggaagccgaccgtgtggatcggacgcccgcagtagaacatcaccggcgtgatgagaatggcctgcagccacgggttcaccatccaatgcggcaccagcgcgggattggccatatgcagcatggtgacggcgaataccggcaacgtcagtaccgcgcccacaatcaccagcttcgtcagcgccttgatctcattggcgcgttcagccgcctctcgccgctcggcctccgccgcatccacaaccggagctccaacccgcaagtctgagggagagaccccctcggcttcggccgagccgtcagcacgcgggcgaagcccgtccttatccgcaccgtccttactctcctctccctcaaccctcaacaacccatgcaccatattcatgccgcatgcaaacggatattcgcccgccggcaacgccggtagttccacgtcggtggtggcgttgcccggcagcatggcgtcaagccccagatccgcgaacaccacatgcgaagtgcattcgccggtctcctgtcgatcgaaagtcagcgtgatcggcgtacccgtgcgcatgctgatcacggcgggggagtacccgcccttgacggtgattgttgcggattggcgttcgccggaggcgtccatggccccggccgtggctttctgcgttccgaagaagaaccgcagtaccagccatgtcaatgcggccgccgctatcagcgccgtggcggccgagaagatgctgagctccataaccgttccttccccttgtttgttgtactgaacaacagtgtataccctatacccctagagggtatataatggggtgtgttcagctgacggataagtatcagggggtttgcgatgcatggttatgacgaagacaaggccaaggtcatcgcacgattgcgccgtatcgaaggacaggtgcgtgccatcacgcagatggtggaggatgacaaatactgcatcgatatcctgacgcagatttcggcgtcgaattcggcgctgaaatccgtggcgttattgctgctggacgatcatctcaaccattgcgtgcggcaggcgtcgattcagggcggcgaggtggccgatgaaaaacttgcggaggcttccgcggccattgcgcgtctcgtcaaatcgtgacgagttttaccgtcattcaccatcgatgacatactgggtaccatgtttgagcaaataggaaccgtgattatcgtcatcgtcgtgctagtggttggtgcagggcttggcctcttcgccggcttcgtgctaggccgtcataagggtcaggagatggctcgaggcgtcaaaagcgaggagctggaggaggccaagacctcgctggagaatgcgcgattcgagaacgctgagctcagtgctcgcaatgctgccgcgcaagctcagattgaaggcgtgaaccagcaattggctttcgccaagtcacaacttgcccaggcgcagcaggctgagcagattcgcattcagcaggaacgtgagcgtgcagctgcggaggcagaacggaagcgtcaggcggatgctcaggccgccgaggtcaagcgtgctgaacaggaagcacgtttgaaagaacagagcaaggtgctcgaggcgcttgcgccagtggccaagaatcttgataccttgcagaacaaggtcacgcagatcgaagagggccgcaagagggaaatgggcgcattgggagcccaactcaaggggctcaacgatcagcaggcccgtttggacaaggaaaccagttccttgtccgccgcgttgcgcaacaacaaggtgcgtggcgcgtggggcgaggcccagctcaagaacattgtcgagtccgccggattgctggaacatgtcgatttcgacacccaggtggtggtcacggatgccgatgggcgtacgttgcgcccggatatgatcgtgcatctgccgggaggcaagaccattccgattgatgccaaagtgccttatgccgattaccagcgtgcctgcgaaatcccggacaccgccagccccgaggatattgcccgccgcgatgatttgctgcggtcccatgccaaggcgttgcgcgagcatgtacgtgctctcggcgaaaaggcctattggaatgcctttgatgtagcacctgattttgtggtggccttcatccccaatgaggcactactgcaggccgcgctcgaagccgatcccacactgatggatgatgcgttctctcgcaaagtggcgctcacctcgccggtcacgctctgggccgtgctgaaatccgtggcctatgcctggcagcagcagtcgctcaccgatgacgccaagcagctgttcgatttgtcccgagaactgtacgaacggttctccacgctgggtgattatgccatcaaattgggcacccagattactaagacggtcagcgcctacaacaagttcgcgtccagtttggaacgccgtgtgttgcccaccgctcgcaagctgcaaaaaatcgaaccgaccaagatcatcgaggaagtaccgatcatcgaatcagataaaggcaatgtgagcgaactgtccgcccctgaagtggtgccggccgatgaaggtgatactcatctgactgcctcaggcgatagtctggagtcatgactgaatctggattccgccccactggtaccccggaccttgccgtcgcgaagagccataatgactttgccatgctggagccgcgtgaacagctagccaccttgctgaaggagcatgtggtgggccgtccgttctccgaacttgccgcggtgactttcgaccaccgtgccgccactgtcatgggccatgtactgattgacgctttggaagatgcgggctattcgattgatgacttcgatgctgttggtgccttgaccgcagcatctgtgcccatggtgtctgccatgatccaggccgccgcctctcgtggcgaggacctagatggattcgtgatggacttcgtctacccgtccatcaagggcccctccatcgaaggccgccgtgtggtgctgttggatgcttggctgtccgaaaagtcgtacgtgcagaccagctcgctggtcaccctgcgcaacggcaatgagctgagcctcgactttggcatagtggagcagctgggtgccaaggtcgtggccatcgcctcgctggtcggtggcggtgccaaagacatcaatgtggtcaacccctccaccggcgacgagcaaacgctccccttcatccaggtcttcgacgaatccgaactgcggtaaatccacctttgacgtccctcgcataaagtcagccgggctgagcagcgaagctgactaagaggaaccggtgaatagcgttatcgaggagaaagattgcacgcacccaaccagatttctttggctgccaaggcttcaggtgaaccggaattccgtgaaatcggccttgggccgtggtctgagacccatcccggtgagcctcgtcccgatgatccgacttcttcgaattatgacggtcgtttcgactcggtgctgttgaacgacggagaccgccgcaacgtattggaccgttaccgctactggaccgttgctgccattaaggccgatcttgacgctcgagggcgtcacgacttcgaagttgcggtggaaaactggacccacgattttaacatcggttccatggtccgcaccgctaatgccttccaggccaagcgcgtacacattgtcggtccacataagtggaatcgcaagggcgcgttgatgaccgaactgtaccagcacgtcgaacaccacccctccatcgccgaactggtggaaagctggcatcatcgcatcgccggtgaaatcgcctatgaacgagccaaggccggtgccgccgccatccatgcgcatgatgtggctgtggatggagacaacaagcaccttcatgagctgctggccgaaatcgatgcttgtgatgcacgcatcaaggagcttcaagccgcccgcgtcatcgccctcgacattattcccggcgcagtgccgatggaagcctatgccttccccaagcggtgcctgctgctcttcggtgcagaaggccccggattgagcgagaaggccctcgcattggccgacgatgtggtctacatctctcaattcggttccgtgcgctccattaatgcaggcgctgcggcggccgtggccatgcacgcatggattgcccaacacgccgtatcaggcgtgtagccatgcgccgacaatcctgccgcatggatcggcggtctcatcgtcaccagaaaagcggatatcaaataatgacccgagtgcctgccctgctgaaatggtctcaaagggtaggaaaatgcggtttcccgacaactgcgtgtcacatacggctcatatagttatggccatgccaacattttcacgcgaagaaatcgtgcatttgggcgatctggcccgaatcgcgctcaccgatgaggaaatcacccgtctgcagggcgaactgaacgtcatcgcagactccatcaacaaggtccaggaagtcgcctccgacgatgtgccgccgaccgccaacccggttccgctggaagcctacctgcgcccggacgtcgccgaaaccccgctcacgcaggaagaggcgctcgccggtggcccgaagaccgaggccggcatgttcgtggcaccgcgaatcctgggaagcgaggagtaatcgatgagcaacgaaaccgcaactctcgtcaaactgtctgctgccgagcaggccgctgccatcaagaagggcgacgtcacctctcgcgagctcgtcgaagcccacctcaaggtgatcgaagccgccgagccgtctatcaaggccttcctgaaggtttccggcgatgtggctctcgagcaggccgacgccttcgacgccaagtccgccgaagacaaggccgccctgcctgagctggctggtgtgccgatcgccatcaaggacatgatcgtcaccaagggcatcgaaaccaccgccgcctccaagatcctcgaaggctgggtgccgccgtacgacgccaccgtcatcgaaaagctcaaggccgccggcatgccgattctcggcaagaccaacctcgacgaattcgcccagggctcctccaccgagcactccgcctaccagaccacccacaacccgtgggataccgagcgcgtgcccggcggttccggtggtggctccgcctccgcagtcgccgcattcgaggcaccgatcgccctcggcaccgacactggtggctcgattcgccagcccggcgccctgaccggcaccgtgggcgtcaaacccacctacggcggcgtctcccgtttcggagccatcgccatggcctcctcgctcgaccagatcggcccggtctcccgcaccgtgctcgactccgcactgctgcaggagatcatcggtggccacgacaagcgtgactccacctccatccccgaaggcccgcgcccgatggtcgccgccgcccgcgaaggcgccaagcgcgatctgaagggtatgaaggtcggcctcatcaaggaactcggcggcgacggcttccagcccggcgtcgaggcccgcttcaacgaggccgtcgacaagctcaaggagatgggtgccgaggtcgttgaggtctcggtcccgcacatcggctactcgctaggcgcttactacatcatcatgccgtccgaggtcagctccaacctggcccgttacgatggcatgcgctacggcctgcgtgtgatgccgccgaccggcgtgccgcagaccgccgccaacatgatggcctacacccgtgaagccggcttcggcgacgaggtcaagcgccgtatcatcctcggcacctacgccctgtccgccggctactacgacgcctggtacggctcggcccagaaggtccgcacgctgattatcgaagacttcaagaaggccttcgaacaggtcgacgtgctcgtggcccccaccagcccgtccaccgccttcaagttcggcgagaagatggacgacccgctggccatgtacatgaacgacatcgccaccattccggccaacctcgccggcgtgcctgccatgtccatcccggccggcctgtccgacgacggcctgcccgtcggcttccagttcatcgccccgcagcagcgcgacgaagtcatgtacaagccggccgcggccctcgaagccgcgctggaagacagctggaacggcccgatctggaacgacctcaagaccccgtggcttgacggtctgggcaagtgagcatcggaaggaaagaaacaacatcatggctgaaaaactgatgaagtacgccgatgccaccaagaagtacgatgtggtcttcggtctggaaacccacgtggagctgtccacgaacaccaagctgttctgcccggcccacatcgagttcggtggcgagccgaacaccgagctgaccccggtgagccttggcctgccgggctctctgccggtgatcaacaagaccgccgtcgattacgccatcaagctgggtctggccctgcactgcgaaatcgccgagtggagccagttcgcccgtaagaactacttctacccggacatgccgcgcgactaccagatctcgcagtacgacaagcccaccaacggcaacggctacctggacgtcgagctggaagacggcaccgtgttccgcgtgccgatcgagcgcgcgcacatcgaggacgacgccggcaagaacacccacgtgggtggcgccgacggccgtatcgaaggtgccgaccactcgctggtcgactacaaccgtgccggtgtgccgctgattgagatcgtcaccaagccgatcgagggggcgggcgaccgcgctcccgaaatcgccggtgcctatgtgcgcgccatccgcgacatcgtgcgcgcgttgaacatctcccacgctcgtatggagcagggcaacatgcgcgctgacgtgaacgtctcgttgcgcccgagcccggacgctccgtacggcacccgttccgagaccaagaatgtgaactcgttccgcggcatcgagaagaccatccagtacgagattcgccgtcaggccgctcgtctggacgacggcaaggagattctgcaggagacccgccactgggatgaggctacgcagaccaccgctggcggccgtctgaagtccgatgccgacgactaccgctacttcccggaccccgacctcgtcatgctccacatcaccaaggagcacatcgaggagatgaaggcccagatgccggaaatgccgcgcgagcgccgcaaccgcctcaagtccgagtggggcctgagtgatctgcagatgcgcgacatcctcaacgccgacgccctcgacctgattgaggaaaccgtcaaggccggtgccaaggctgccggtgcccgcaagtggtggctgggcgagctttcccgcgaagccaacgccaagggtgtgtccctcgaagagctgccgatcaccccggccgatgtggccgaggtcgagaagctcatcgcctccggcaagctcaacgacaagctcgccaagcagaccgtcgaaggcgtgcttaagggcgaaggcactccggatgaagtcgtcaagaagcacgactacaagatcgtcgaagacaacggtgccatcgaggcggccgtcgacgcggcgttcgaagccaacccggacgttgtcgagaagctcaagagcggcaacatgaagccgatgggtgtaatcatcggtgccgtgatgaaggccacgcgcggtcaggccgacgccaaggccgtcaccaaggtcgtcatgggcaagatcaagggctgattagattcactggctcccgctggtgggagctgtcgaacggagtgagactgagggtggtcgccatgtacggatgaccaccctcagtccgcttcgcggacagctcccgccagcgggagcctttattgattctgtaagaaagtcgactcagagcatttccagcgttcacccagtcgagtaagatatgttcggcactggaccgtgagccgaaacaagccgaaccgggggatgtataccgatgaccgcaaccaacgagacgctgagcatggctaccgaagcgcaactgaagcgcgatctgccacagagcatcgtcattccgccaatccgtggagaaatggtgcacctgcgccccgccaccgtcgaggacctgcctcgtttggatgaacttgatgccttctatggcgcatccaagatcacaggtaaggatgcggtcaccgaacgcgccatcgtacacacgtgggtccgccgctcccaggcttgggaagccggtcaggcacccgccgaatccggtgtgggtgatccggaatcccgccgcaccatcgcatgggccgtattgactgacgccgaccatgacgatgacggtcagctcgatgcggccagcaccgataatgtcatcggcatgattttccttatcgacatcgacggctggtccaagtccgcccgcatccagatcatcttgggccgtgaataccgtggccgcggctactcccgtgacgccatgccgcgtgtgatgacctacggtttcgcgcccgaaccggccggcctgggtatgcaccgcatctgggtgagcgtgccggaaaagaacagccgctcgatttcggtctaccagtcgctcggcttcgtgccgtccggcacctcgcgcgacgcgttgtgggatgccgaaaacaacaaataccaggaccttatcgtcatggacacgttggccgacgagtacgatccgattcgttcgcttgacgcttttggcatgcacttgattgaggacaacccgggtgtcaaggaagcgctgtccgcgcgcgagcattccatcgccatccagcagaacaagccggaacccgagccggcacagcgtggtgaggcagccgccgccacgacgagtgacgtgcagtcccaggcccagacgccggcggccgcgcagccagtcgagccacaggccgagcaccacgacgatacgcagaagaacacgcgccacagtctcgaagaggaaagcaactggccgtacggtcaggcagaacgcaagccctcaaaggaagcatggtggcgtacgctgggccgcggccgcaaacgcgatacggaaagtgagtgagtaaacaagcatgagtgccgaggatctcgacaattacgaaaccgacgccgaactcgcgctgtatagggaataccgtgacgtcatcaagctgttcacctatgtggtggagactgagcgtcgcttctacttggcgaataaggtcgatttcaacgtgcgttccgctggtcaggacgtgtatttcgatgtgcagctgactgacgcatgggtatgggatgtctaccgttccagccgtttcgtcaagtccgtgcgcatcgtgaccttcaaggacgtgaacgtcgaagaagtccagaaaaccgatatcgacattcccgacgatattcactgacaggcaatcgtctgatacagcctgtattgacaatgcgcggcattccgtcatcttacggcggggcgtcgcgcattgttcatacaacgcatagcaaaagttcagactcgtaaccttgccatcgtgtgtcttgtttgcttgcggctgatagaaaatgctgcatgaacacacaccatatgcagcagggccttaagagctccatcgcgggcgtggttgctgccgccacattgctggccggtggcatcctgaccgttccgcacgccatggctttggaggccgatggccagtattacagcagcaagcagccatatgtggcacctagcgaagcgaccactgccagctatagccaggcgccggaaggctacgaaacggtatacaccgagtcgatggctcgccacggttcacgcggcctgtccagctacaaatacgacgcattgcttatgaagatggccgaagccgccgaagcggataacggttttaagtctgatgccatcaagtccgaattcatgaagaatctcaaagccatcaccgccgcaaatgtggagaatggctacggtatgctcaccggtcagggtgctgaccaacatcagggcattggcgcacgtgcctacgagcgcaacaagacgctgttcgacaacgcagccaaggacggtggcaagattgcctatcagtcctctggcgaagcccgcgctactgaatcaggcgagaattttgctcgcggtttcaacgcggcctcgaacaataaactggcgaacagcactgtgacgcccgccgatccggccggcaccggcgaggcggcggctttcgacaagacgccgaacacgctgtacttccacaagtccgaaaacccggacggcactgagaaaaccggtgaggccaagcagcgtgccgacgattaccagaacttcgtggaaaacgatgcgattatcgcaggcgctgagcaaaccatcgccgaaaacgaggacgtgaaaacagcctctcacgatttgctttcacaaatcttcaccgatgacttcctcgccaaactggccgacggcacgtacgcctggtacaacactgtcgatggcaccaagggcggcgaggccaactgcgcgccgggagccgaccccagcaaggatgccgacgcctgcggcgcagccaagaagaagatcgcctccgaatacgatgccgcgatggatctgtacaacctgtacatcatcgccgctgatatggagaacgagaacaccggcagccataccttcgacttcaaccagtacttccaaggtgagcaggcagacgacgccaagttgttcgcctgggcgcttgacgccgaggacttctacgagaagggcccgagctacgccggccaagacgagacctacacaatcgcacagccgctgcttgacgatttcttctcgtcgattgatgagcgcgtaaacggcggatccaccgttgctactttccgctttgcccatgccgaaacgatgatgccgttcgccgcgctgcttggccttcccggttccacccagcaggcggccgccagcaccaccgacgtgtacacctacgccaacaatgaatggcgcggtgaatcggtgactccgatggccgctaatgtgcagtgggatgttgccgtcaaatccggcaacgacccgaagaccggccgtgcctacacgccgctcgttcgtatgctctacaacgagcaggaaatcgccttccgctccgaatgcacgccgattgccgatggttccacgtggtacaagctcactgagcttaaaagttgcttggcctccgaccaccaaaccctaggcgacgatgcgcatctgactgatgattccacaacgcagccgggcacaggacctaacactggtgaaggaacgagtaccactccgaataacaatggtgcgggaactcatcagcccagcaacactcaggctaatggtacggaaaacgagttgagtcgtactggtgttgccgttactggtgttgcggggattatgatgctgcttgcacttgcaggcatctcgctgaatctatggaaagttcgtcgctgacgaattagcctaagaccaaaccgattcgccgcgctgtgtgtgacgcaacgttgccgaatacccctacctcacgattcgatgcgtcgcctttctgctgatggaaagacggcgcatcggtcgtatatcgggagaattctgtaagcattcgctcatctttcggtgtgcgattccggggcttctagtagactgtctctgattttgcgtttataaggagcataatgaccgacaagcaatccgtagtgattatcggcggcggtccggctggacttaccgccgcatgggaactcatcagggacggcggtgccgacaagtacgacgtgaccgtgctggaggggacccgcgaattcggcggtatctcgcgcaccgtgaagcacaacggcaaccgcatggatatcggcggccaccgtttcttctccaaagacgaacgcatcatggattggtggaagaccgttctgccgttgcagggcgcaccctcctatgatgacaagaagctcggccgcgaccacgacatggagccgggcggccccgatccggagacggaggacaaggtgatgctcaagcgccaccgagtgtcccgtatcttctggaaccgccacttcttcgattacccgatttcgctgagccccaacacgttgaaggccatgggcttcaagctcaccatggtggccggcttcagctacctgaagtccatgttccacaagctgccggaagacaatctggagaacttctacatcaaccgtttcggccgcaagctgtattcgatgttcttcgagggctacacggagaagctgtggggccgccacccctcccagatctccgccgactggggcgcccagcgcgtcaagggcctgtccatcatgggcgtgctcaagaacgccttccagaagctgctgcccaagaagcgctccaacgcggaggtcgagacctcgctgatcgaggagttctggtatccgaagtacggtcccggccagctgtgggagaccgtcgagtccaattgcgaggccgccggcgtcaaggtgctgaccgacgccagggtggtcgaggtccgccagaccgatggtgccgtgtcttccgtggtgtacgaggattccgagggcaaccgcaccgagctttccggcgaccagttcatctcctcgatgccggtcaaggacctggtcaacgccatcgacgcggccggcgccgatcccgaggccgttgattccaagcccgccccggccgatatgaccgaggtggccaacggcctgccgtaccgcgatttcgtgaccgtgggcctgctggtcaagcacctgaagctcaagaacaccaccagcatccccaccctcggcaatccgccgatcgtgccggactgctggatctacgtgcaggacccgggctacaaggtcggccgtctgcagatcttcaacaactggagcccgtacctggtcaaggacgtggacgacaccgtgtggatcggtctcgagtacttctgcgaggagggcgactcgttctggaacatgagcgaggaggatgtcaccaagttcgcgatttccgagctcacccgcatgcgtgtgatcaacggtccggacgaggtcatcgactcccatcgtgagcgcgtcaggaaggcgtaccccgcctacttcgacacctatgagcacatggacgagctcatcgagtacctcgacggcttcggcaacctgtactgcgtgggccgtaacggccagcaccgctacaacaacatggaccactccatggccaccgccatggaggccgtcggcaacatcaagaccggcaagacgtccaagaagaacgtgtggtccgtcaacaccgaaaagtcctaccacgaagaaaagtgaataaaccttgttgagctccctcgtcacagagggagcttttttggttttcggcgggccgttttgcgttggtcgagttggcgttgtacagtgaacgaagttcgcagagactcagagacgcagcgaacattcatgagcggtgcaaccgcaataatcactcttaacgcctggataggcatgggtctgttcggtatggaaagggcaaccagtggcaaatagccagaatcttgaggatatgaagctgcctgagctcaaagagctcgctaaacagatgggcctgcgcggcacgtcgaccatgcgcaagcccgagctgctcgccaccctgcaggcggcgcgcaatggtggagagccgccggccggtgtgaccgtgcgcgcccccaaggccgccaaaaccgccaaggtcgtcaaggctccgcagtccgatgccgctgaggccaacaccacagacaatgctgacgtggccacccagtcgccggctccggctccggctgccacggaaccgcagctcgatttgccgcttcccgtggccgacgatgccaagaaggacgagaccgaaccgcgacgcacccgtcgtaaggccgccgatgatgccgcatccgaaccgcgtgcggcccgccgtcgtcgcgatgacgaccagcccgatttcgctcgccgcaagccgcgcaagaaggccgatgaggccggcgatctgctggccacgctcgatttgggagatgcagcgcctaccgagcgtcgccgcgagcgtcacgaggacgtggaagttccgctgattcgccgagtccgtgatgatgaggacgagcagcctcgccgccgtcgtcgcactgcggaaaacagcgaagaaaccgtgcgtgacctcgacgatatcctggccacgctgcccacgcagaagcacgaggaaacgtccgaagacggcgagcagaacgacgatcacgagttcgtgcgtcgtaaccgccgcgaccgtagcgatcgcaacgatcgcgatacccgtaatgatcgcagcgatcgccgtaaccgtcgcatgcgtggccgtgatcgcgacaacgccgatgatgatcgtcgctatgatgatcgcgataatcgtagcgatcgcaatgaccgtgatagccgccgcgaagagccgcaggaggatctggtgccggtggccggcatcgtcgacgtgctcgactcctacgcttttgtgcgcacttccggctacctgcccggcccgaacgacgtgtacgtttccatgggccaggtcaagaagtacggcctgcgcaagggcgatgccgtgcatggttcgattcgcgccccgcgtgaaggcgaccgccgcaaccagcgccagaagttcgtgccgctgcaggccatcgattccatcaacggccaaagcgttgaagaagcgctcaaccgtccgcagttctccaagctcacgccgctgtacccgcaggagcgtttgaagcaggagaccgccccgaacaagctcaccggccgtatcatggacatcgtttccccaatcggcaagggccagcgtggcctgattgtctccccgccgaaggccggtaagaccatcaccctgcagaacatcgccaactccatcgccgccaacaaccccgaggtccaccttatggtggtgctcgtggacgagcgacccgaagaggtcaccgatatggagcgcacggtccagggcgaggtcatttcctccaccttcgaccgtccggcctccgatcacaccacggttgccgaactggccgtcgaacgcgccaagcgtcttgtggagctcggccaggacgtggtcgtactgctcgattccatgacccgactggctcgcgcttacaacatcgcagcccctgcctccggccgcatcctgtccggtggtgtggacgcgcaggccctctacccgccgaagaagttcttcggtgcggcccgcaacatcgaaaacggcggctccctgaccatcatctcatctgcgctggtggaaaccggctccaagatggacgaggtgattttcgaggagttcaagggcaccggcaacatggaactgcgcctgtcccgcgagctggcggacaagcgactgttcccggccatcgacatcaacgcttccggcacccgccgcgaggagctcatcaccaacccgcaggaactgccgattatctaccgtctgcgtcgactgctgggcggcatggagcccgagcaggcctaccagacgctggtgccgcgcctcaagaagaccgccaccaaccgcgacttcctcgccgccatcgtgcagcaggccaacaccggcaacgcggtcaacggcaactgatcagaccgctgaacaatagtgtaagggctgcaccctgattgatacggggtgcagcccttgtcgtatctgatgcaaatacatcaactatcacattgcagttgtagtattgccgtcaacgttcacatgcacgctgacgatatatgagatgaaagaggcatcactgggttcgattgttttgggagtgggcaatggtgcggccatgttcggcgatgcggatgccagccatatcctcaccggcgactatgacatctgagatatctgactttgcgcatcgtgcaaagccgtaatcgggagtatcctcgaatctatgagcgaaacgagcagcgactggcaaaggaccaccatcgactccgcccaggcggcggcccacccggaaaccgcacaagcggtggcgcgcatcaaagcgctgcgccaaaccatcgataacatcgattcggcggtcatcgcattactggccgagcggttcaaggccacctcgcaggtcggcgtgctcaaagccaacgccggattcgcgcccgaagacaccaagcgtgaggactatcagatcgaacgcctccaccgcatcgccatcgatgccgggcttgatccggaaattgccgaaatgtaccgtgaattcgtggttaccgaagccaagaagcgccaccagcgcatagccgatgccggtggtgacccgggcgtactcgacgtattcgcctgattcgcccgcagcgaatgggcacctttcggatattcgtctatagggcaagttgcctgcagcgactacattaatacgggaatggaatgcccgtagtggtcgactgtatgaatgggatacgtagatgagatgtggtgccgcactggtcagttgcgcattgtgcgtggcttcgattctcggcggtgcttggatgtctcgtccgactccggttgattacggtccggtgctcgctacggcaagtgatatgtacgccgtcaccgatgccgaaggggagccggtccgttggtatgtggtagggaagggcggcgccggcaatggcgccagtgccgattccggcaatagcggttccactgataccgattccgccaatagtaattccggcacgtccaaggtttctcgtatccccgcttccgccgccaccctgccatggaaagtcagcgtcacctactcgcttgacggtccgaacgtcgaggcaaacgaggttgccggcgcgtctggactgatcggcgtgtatatcgatattaagccgcaaaccaaggaagccaaccgtacgatcccggttgtcgcctttaccgtgcctacgcaggtagccgatgatgtttccgctgacaactccattacggtgaccacgcaaggttccaataccgtagtcgccgcagctggaaaagccgcaaccggcttggaattcagctgctatatgaacgccaaagacttctccatgagttccgtggcgctcgccgtattgccttccaattccagcagtccggcagttggtgctaatcccgatgccgcgaatgctgcgaatgctgccgcacagcctgctgccgatacggatgtcgcccaactcaccgcctctgccgccacactggtcgattcactgaccgacgccggttctggtgaacagcaacagctcatcgagcagcttcaaaccctgcgcgataacgaacgtgcgctgaacaagtctgtagtggccgaacgcgaaaccgcccataagcggacgtttgaagactatatggccgcgtatgtgggctcatataccacgcacctgtctggatcgattggcacctccacccagttgccggcgttgatgggcacggccggcgaactgtccggggacacgcctttggctcaagccgtactcgacttggccaacgcggtgaacaacgtcagtgccgcacatcagcatgccggtgcggtcgatgcgttggacgaggtgattcgccgcatccagcagcaaggcaccaccggactggtggatgatctgatcgccgaggcttcggaggaagccactcaaggctccaagcaatacgccgatggccagagccagctctccgccgcaatgattccgtattcgatgaaatacacggacgtttacacggccaatttgagcgccctgaccggcggcacgtcctcgggcgccaccgcttacgagagccaagccatcgccgaaaccaacggtagcgatgaactcgccgacgctcaatccaaggtcgatgccgcgatgagcacgcttgccaccgcctccgagcatacgggcaaagccacggccttgcgccagattgtattgcgattctccgatcagttcgaaggcggcgcgtcctcggcttccggcagtgatggtgatggttcgtccggtgatgtctcttccgatccggtgaccgaggctcaggcactgaccggcctggtcgattcgcaatcgcaatcgttctacggcaagacccgggtcgcccaagccaagcgtaaggccgatgccgcccgtaagcaggccaaagccgcgcaacagcagcagtcgcagcattccaaggcctcactggtcgatgacaccatgtccatgtctgctggcgatgtgatgaactatgcgggtggtcttacttcggccatcggtggtggtggtaagtccgactcgtctaagagcgctggttcgggaacgaacgactcagccaagtcgagcgacactggcgattccggcaacaatcttgacaccgctccagtactgttcggctttggcactggcggcacgctgctcaagcacgatatgaacgcgctgattaatgagaccgtgaaaatcagtgatgctggcacgctcttggcgcaggccgtcgcgcagctcgacagccccaatacgcaacaaaaaaccgccgaaacccgatatctcatcgtgattccgacggtgtgatggtgtatgcgggatatttgcgtgccgtcccacagtcgtgtcatccgaacgtcaaaaaacaaaagaggggaacctcaataggttcccctcttttgttgttgtgcgtaacgttcagtgctttggcttcttagctggccgagccgttaagcgggaagcccggtgggcttcccgtaggctcggaacgagcggcattgccgtgagacctactgttgttgtgcgtaacgttcagtgctttggcttcttagctggcggctcaccgagctcgctggcttcgacggcgacctcggtttcgggcgtgccttcggcggcggattcctcggcgtgcttggccaccaagtcgaacttgccgaccacgcgaccggcctgtgcgatatcgcccaaggcggcgtgaatcgcttccacaccttccgaagcagcggacagtgccacagacaggattggggtcttcatggagaccttggcctcggacttgatcttacgcagctgctccacggccttgccggcccaagtcagcagttcgggggaagcaccggtggcggcctcgacatacgggtccacgaccggccaggcggcgcgatgcacggaaccggaaccggcgtgcatccagctccacacttcctcggtggcgtacggcaggtacggggccagcagacgtgcgaaggcgtccaggcccagacccagagcggtgcgggcggacttcacagccttctcggacggcacattgccgtgctcgtccggagtgccataggcgcggttcttgaccagctcgatgtagtcgtcgcagaactgccagaagtaggactcgatgacttccagcgccttggaatgctcgtaggattccagcgcctcggtggcctgacgcaccaccaaagccagcttggccatagcggcgcgatccagcggttcggtcacatcggccgggttccacgcggcctcggcggcagcgcccacgtgatggttctcgtcctcacggccgatggccagcgcgaacttggtggcgttcagcagcttgatggccagtcgacggccaatcttcatctggccgatgtcgtacgtggcatcgaggcctaggcgagcggcggcggcccagtaacgcacggcgtccgcgccgaacttctcgatcggctcgttcggcaccacgacgttgcccttggacttcgacatcttcttgtggtcggggtccagaatccagccggacagcgtggcatgggcccacggcaggcacttgttctccaagtgcgcgcggtccacagtcgagaacagccaggtgcggatgatgtcctgaccctgcgggcgcaggtccatcgggaaggtggaagcgaacagggccttggaggcctcgtccggctcggcccagtgggtcacgatctgcggggtcagcgaagaggtggcccaggtgtccatgatgtccttttcggcggtgaaaccaccgggcacatcacgctgggactcgtcgtagccctccggcacgtcgatggtcgggtcgatcggcagacgatcctcggacggagtgatcgggtgatcgtaatccggctcgccggaagcgttcaccgggtaccacagcgggaacgggacgccgaagaagcgctgacgggagatcagccagtcgccgttcaggccgtgcacccagttctcataacgcacgcgcatgaagtcggggtggaactcgagttccttgccacgttcgataagctcggcgttcagcttggcgtcggtaccgccgttcttcaaataccactggcgggaggtgacgatctcgagcggcttgtcgcccttctcgtagaagttcgtcatacgcttggtcggggtcggctcgccgtccagatcgccggactcgcgcagcttgtcgacgatgatcttgcgggcggagaacgtggtcttgccagcggtttcggcaaagacctcgcggccggccgggtcctcgatccagtccggggtatccatcacgatacggccgttgcgctggatgatcgggcgggtgggcagcttcaggtcgcgccaccactcgacgtcggttacatcaccgaacgtacagcacatggcgataccggcacccttgtccatttcggcggccgggtgcgccagaatcggcaccttgaccttgaacagaggggagtagacgtactggccgaagtactgcttgtagcgttcgtcgttcgggttggcgatcagcgaggtgcaggccgccagcagttcggggcgggtggtctcgatgtagatcggggtgccgtcctcaaagcggaaggccaccttgtggtagaagccggggtattcgcgcgattcgagctcggcctgggccacggcggtctggaaggtcacatcccacaggccgggggcgtcctgctggtaggcctcgccacgggcgaggttgcgcaggaaggccttctgggccacacgccgcgggtgctgaccgatggtgtggtaggtctgcgaccagtcgatggacagacccagcttgcgccacagggcctcaaacagcttctcatcctgagcagtcagacgctcgcacagctcgatgaagttcttgcgggaaatcggcacctgatccttggcgtcaatcttcttgccatcagtgccttcaaacggcggcttgaagtccgggtcgtaaggcagagacacgtccacgcgcacgccatagtagttctgcacgcggcgctcggtaggcaggccgttgtcatcccaacccatcgggtagaacacgtcgtagccgcgcatgcgcttgtagcgcgcaatcacatcggtgtgcgtgtaagagaacacgtgacccacgtgcagcgaaccggagacggtgggcggcggggtgtcgatggagtagacggccttgcggtcgcgggtgttgcggaatttgtaggtgccgtcttcatcccagacggtgcgccacttgtcctcaagtccgtccacgccgaccttgtcgggcagcggggtgaggttggcgttgatgatggatttgccttcagtcataaggccaaagtttatgcacgttgcatgacaagccgaactgtacagtaaacagcccagtaggctgttcgcaggcgaggtacgaacgatcgaacgatagtgagccaaggactatcgggcgtagcccgtccgtgactgaaggttgcctacttcaccgtcaacccggccagcggcatgcggcgattgatcatcgaggtcgggtagccggagaccttggtggacgccacagtgaagcatttgcgggtatacagccaatcactggccgcatcctcgctgatcagccgggcgtacgccttcattcgtgcctcataatcggcgtcattagtggcggcgcgagcatccgcataggcctgttgcgcttcggtatggtcgtaatggaacatggaatcggggtcggcgaatatgccggcatcatccgtgccgtccatgctcatcacggtcagttcccatttgccgtccttgattcgtttggcataatcctcatcggagagcacttcaaggttcaccgtggggcgcggctgccgctcgatctgctgcttgatggtttcggccaacgaccggtattcttcgggaaccaccagattcaccgtagtcaggtattgcgcaccaaagtaggagaacatctgcccagcttggttttcgtcatgcgggtacagtccggtcaaatcttcgtatccgggttccagcaggctgatggggccgcccaatgctccggctgcgtcgggttgggcggaggcgatgccggctgcgtcgatttgatagcggaaggctttacgcgcctgttcgtcggagagcagcgaatcggtgccgttgttgtaggccagcagcaccttatccgtagtggccccctccttgacggtcaggccatccttgccgttcaaaccggtggccgtcgaagccgaaaccggtgccgccatatcgagactgccgtcggtcagggccttgctgagcgcatcggcgtcggagtattgcataaattcaacgacattgctggccgctttggtgccatggtaggtatcgctgcgcgccagcttcagggaatggccaggctggaaatcggccacggtgaatggtccggaacctatggccttgcgttgataatcggcactggacgactcggaatcgtagacaatgccgagtctgccggacagcgctcgcagcagcgtcggattgggcttggcaagcgtaatgaccaccgtggtggcgttcggattggcgaccgacgccagatcgcccaattcgtcgacgtccgccaccttgttggtcacgttctgttgcaacgaccacacggcgtccgaggcgtccaacgtatggccgttcgagaaggtgacgcccgattgcagtgtcagggtgacggtcagtccgtcatcggaagtcttccagcttgtcgccagtcccggctgaagcttgttgtcttgatcgacggtcactaatgtctcatacacattgtcgacgagcaggcgttcggctgccgcagaggaatcggaccgaatatccaaggattgcggcatatcgtcgatgccaatggtcacatcggcatcgagggatgatcccggctggaaccggttttgcatgaacgtccatcccacaaccacgagtgcgccgagtgccacggcgactccgaaaaaaatcccccacttggaccatgtattgttccgcttgctgtgctgcatggttttcagtctagcggtggattcagcctagaatccgcaattcaccatgatgaggtatgagttagcgcttggacgtgctcttgccggcgggcggcgcatagctagggcaggtgtcggacagcgggcagttggcgcagtcaggggtacgtgcgtggcaggtggcccggccgaacagaatcagtcggtggctgagattcgtccactcttcgggcggaaaacaggaggtgatttccttctcgattttcacgggatcggggtgtgcggaccgccaatccgaccgccaacgcagtcgtccggttacgcgcatcacatgcgtatcgaccgggaatccggggatatcgaacgcgttgccgagcacgacgttcgcggttttgcggccgacccccggcaagctggtcagttcatccatcgtgcgcggcaccacgccgccgaatcgttcgtccagtgccgtggccagtccgatgagatgctgggttttcgaacgatagaaccccagcggatgaatgatgtcttcgacttgggccgggtttgcggccgccaagtcacgggcggtggggtaggtggcgaacagttccggggtgaccgtgttgacacgcttgtcggtggtctgggcgctgagcacggtggcgatcagcaattcgagcggattcgagaaatgcagtgcgcaagcgggtgccggaatcacctggcgcagaatgtcgtattcgtcatgcatgcgcgtgagacgcgcggatttggtttctctcatcgtatggacctaagcggcgtaatatcgatgattgatagtttgcagcgccgctggtctgtcaggcgacggtgttgagatcgggagtatcgtcatcggtgtcgatggcggcagaggatgctttggcggcctgctgtgcggcggcagtttccttatccgtctccggcgggtcgaatcggtagcccacgttgcgcacggtgccgatgaggtgttcgtattcgccgccgagcttggcgcgcagacgacggatatgcacgtcgaccgtacgagtgccaccgtagtagtcgtagccccatacttcctgcagcaactgggcgcgcgtgaacacgcggccggggtgctggaccaagtacttgaggagttcgaactccttgtatgccagatcgatggggcgtccatgcagggaggcggtatagccgttggtgtccacaatgaggtcgccggagcgaatctggccatcttccaccgtggtggtggattcggcgggagaaccggctgctgcggctgcgggagcgttgccgcgctcggagaccaatcgcaatcggccctcgacttcggccggggaagcggtggcgaccaccacatccgcaatgccccactgggagttgaccacggtgaagccgccttcggtcagcaccagcacgattggcgtggacaggccggaagcgtggatgaggcggcacaaggttttggcggtcgccagatcatcgcgtgcatccagaaacagaatggtgttctccggcatcttcaccaagctggctgcatccatcggcagtacgcggacgcgatgagaaagcagggcgagtgatggcaaaacggtggcggggtcgctggcgaaagtcatcaacgtaagatccgtcacgctaatcccccttatcctgcaatgtgttacgcaattgctcggtgtggctgtacgagtcgtcagcggcgttatgccgctttcgcacggttttcattattctacgcgcttgtagtggacacataggttacaagtttgcggaatatggaacggtggacgtccatcaaccgatgatacggccgagcaccagtgcggttgcggcgatggtcacgcccatcagcattaccggcatcaggccggtaccgatccacggataacggatatccgggtccggatcggcgtcgcgcacccacaacgtggaagccacggccaaagccagtcccaaaacgatgaggatgatcagggcaacggttcccgcaacggtgcccttggcgagcatcgcgcccaaatcaggtaggaagcaccagccggccacggcgagagctgccacaccggaagtcacggcgtgagagagtgcgcggataagatgttcgcgcttctcacgagccatctggcgtccgaaggagaagaccaccagcaccaccagcagcaggcccatggccagtgcccatgaataccaaggaagtaccgagccatccgcagcggtctgatccggcggaacctcgctggtcgggaaaggtacgatgacgaaaatcagagaaatcgcgccaaacaccaaagtgacgatacgatccagtatgctgccgcggaacggccagaatacgacaaatgcggccaacgtcagagcggcgataatcaaagggatgatggggacggtgccaggggagggaatgaccgtggctgcgatgaacagtacataggacgtcagttgggccaacaacatgctcagagctttgttcttccaaccctcctgggtgatctcggtcatgatacgcctctcagataatcgaatttctatcccaatcctacgtcgggcattggaacggtgaaatcaaacaaaatagccccttctggtgaaggggcttatggcactaaatcagaacgcgataacgcccaaatgctccaatagcactttgatgccgagtagaatcagcaccacgccgccggcgatctgcgccggcttctgccagcgggaaccgaacgcgcggccaatgtgcaggcccgcagcggagaacagtccggtgaccacaccgatgctgaggatggcgaatgccatatgggctttggtgaacatgaaggccaggctcacgcccacggcgaacgcatcgatgctgcaggccacggccaggggaagcatatgcttccaatcgaactgggcggtctccttggagttttcctcatcttcttcgaaggcttcgtgaaccatgttgccgccgatgaacaccaacagggcgaagatgatccaatggtcgaattgggttacgtatttgctgaatgtagatgccgcgaaatagccgagaatagggaacagcatctggaatccgccgaaccagagggtgcttttcacggcgtcttgtactcgtacgcgggatacggtcaggcctttgccaatggatacggcgaatgcatccatagctacggaaacagaaataagcaggatttgaatgattatcgaaatcatggtgtgacagaaggttcatcgccggattaccgtgcgatgggcctcgaccagcgttcctacacgccgcctacgcctagttgaaaagacaaaacattactgtatcacaaaatacaagctccctctgttggggagctggcgcagtgaaactgcgactgagggagagtagagcggctttgccacaaatacaacaaaaggcccccgaaggggcctcctgtcaacgattcagaatcgaatcacttctcggaatcggcgagacgctgacgcgcggcaatgatttccttttcggcggcgtcagcaccagtccagtagtcgcccggcaggacttccttgcccggctccagagccttgtactgctcgaagaagtgcttgatttcggccttgtggtactcgttgacgtcgtcgatgtccttgatgtcatcgaaacgaacgtcggcgggcacgcacagcaccttgtcgtcgccgccggcctcgtcgaccatgtggtacaggcccacggcgcggcactcgaccacgcagcccgggaacacggagttcggaatcatcacgagagcgtccagcggatcgccgtcctcgcccagggtgccgtcgatgtagccgtagtcatccgggtaacccattgcggtgaacagggtacggtccaggaagacgcgaccggtctcgtgatcgacttcgtacttgttcttggagccgcgcggaatttccacaacgacgttgaaggtttctgccatgtcatttctccttgaaaatcgacagttacgttatcgtctcaccacaataccctgtttacgcctgcaaaacaggtgcggaactcaagaaaccgtgctgagattatgccgacactatgcccaaacagacgaaatcctccccttgaggggaggatttctagcggtttacgcgcacgataaacccatgcacgtcaacggcatcactgttgcattaccgttgcagtaccgcatcactgcacggacaggatgtgggccacatccgcccaaggagccagagacacgtagttgtcccaaccccactggaattcgcggccggtcagctcgtcgcgcacgttgagagggcggtcggtgggcagacccagctcgctgagttccaggtgaatcatcgactggtgtgcgttgtgtccatcgaggttcacgaccacaatcagcgtgtccgcttggccggtaccggtcagttcggccggcgtgtggcgtgcgaaagccagaatattcgggtcggacgtaggcagcacggtgaggttgtggtagctcaacgcggccgggtgggcgcgacgaatcttgttgagtgcggtgagcatctcggccacgccgtactgcttggccttgctccaatcgcgaaccttgacctcgtacttctcgttgtcgatctgctcttcgaagccggggcgctgcttgttctcgatgagttcgtaaccgttgtagataccccaggacggcgagcccatggctgccagcaccgcacgcacgcagtggccggctacgccgttgtctcgcacgtaagcggtgagaatatccggcgtggtgggccagaaggtgttgtgctggtagtagccgtcgtcgccattggtgaccggcagatactcttccagttcgtccttggtgttgcgccacgggaagtagcagtgggactgggtgaagcccacgtagctcagggcgcgcatcatgcccgggcgggtgaatgcctcggccaggaacaggatctccgggtgcttcttggtcacggcggcaatcacgtcctgccagaaacgcaccggcttggtgtgcgggttatcgatgcggaagatggtgacgcccgcctcgatccacagattcatgatgcgttcgacttctttttcgatgccgggcatgtcggcgttgaagtcgatcgggtagatgtcctgatacttcttcggcgggttctcggcgaaggcgatggagccgtccggcttgtggcggaaccagttcgggtgggccttgacccacgggtgatcgggcgagcactgcagggcgaaatcaagcgcgatttccagacccagttcatgtgcacgctggcacagggccttgaaatcgtccatggtgccgagcagtggatccacggtgtcgtggccacctagctcggagccgatgccgaacggggagcccgggtcatcggggccggcgaccagcgtgttgttgcggcccttgcggttggtcacgccaatcgggaagaccggcggcaggtagacgatgtcgaagccctcggcagcggcgcgttcgaggccggccatcgaagtcttcagcgtaccctgaatgatcttgccggtgttcggatcgatggtggcgccttcggaacgcgggaagaactggtaccaagccgcgaagctggacttcgggcgttccaccttgaagcgctggggctggctgggggagatgccgtcgcgcagcgggtgagtctcgtgcagggcggcgatggtcgggttgtcgccggcggcgagacgatcctcggcgctcagcgtctgatcggccatggtctcagcggccttctccaaggtcttgcgatcgcgtgcggtcaggccggtgtccggggtttcggcccaacgggccagcaactcggcaccggaattgagtgcgttgtccacgtcgtccatcacacgcaccttgatgcgggcgtcgtgcagccaggagacgtacgcgtcttcccaaccttcgatggtcacggtccattcgccgagctgacgcttgacggccgcgtagccatcctcccaaggcttcagatcgctgtgctcgccgcacttgaccatcacggtccaacgatcgaggccgggatttacgcaggtcatggcccggcgcatggtttccttgccgcgcgggttgcgcacgatggcggtggcacccaccttggtacggccttcgatgaacacctgggcggtcatctcaaacggttcgccgagttccacacgggcggggaagatgccgcgctcctcggcgggagtgatgtccatgacattgatgcggccgaactggccgggctcgtttgcttcgatggacggtgcgggggcttcgacagccaggcctttcagcgctgctgcggcgcgtgccgtttcggcgctgactctcttgcgcttggttgcggggctctttcgggcagaagtcgcctttgacttcgttttcgtggtgctgttatcggtattactagtgcgcgtggtcgcgcgatgttgtactgctgccataaggccctattctaagggcttttgaacatatgttgcgcattgtggataactatcaggtaaacgttcggtcaaccgcatgaggtggataactcggcggaagagttatccacaactcgccggcaaacggcaagctcggaccacataggtcgaaaaaccggctgtagcgaatgaaaatctgccatgatcgtggcctacccgcacacagtgcagtatgcggggaaacgtaccaggaaaggacgaatgatgataacgacatggcggcaacggggcatggccatcgtagcgatgctgaccggtctgataataatggtgggagtggtgttcggctcggcgaatacggcgtatgccgcgacgttgacgcccgccgacgaaagatatcacgtggcgtttccatacaacgatatggaatattacgtcggtgtcgcggggctggacgcttcgggcaacaagtactactgcatcgaagcggggaaactgagcgactatgtgataggccccaccacggtgcttgcctccgatgagaacgcccggcgtatggcatggatccttgaccggtaccgcgacacggatgccgccacccatgcggcgatcggcatcatcgtgcaggatcacttcgggcgcgatcgggacgagtgggcgagacagatggcggtcattcaaggccggtaccccgagatcgtggcgaaggcggcccggatatgggatcaatcggccggcaagacgcctgcgggcacgacggtggaacgcaccgatgccgaggctttgcgcagcggttccatctcggtgaaagtggtgaaccgcgccggtgacgcgatcgcgggagtgccgttcaccgtcaccttgcagggggcggcgcggttcgtccaaggcggcaacacgttctcgggggtgtcgacgagcgccgggtcctcgatcgcgtgggaggcgaccggcgccggcgaggtgacggcgaacaccacatacgagtatgggcggatgcacgtcatggacagcactcaggacatgctggcctttgactcgatggcttccactggcggcgcgtcgacgacatttcgggtgcgtaaggattttgttccggcggtatccaccaaggtctccgagaaggtgcttgatgtggcttctccggtgttcgatgacgtgaccagtggcgtggcggatgcggacagttattgggtgcccgatttggaattgcaggcccgcggatactatttcgatggtcttgatacgggcgatgtgggcaatgtcattacgccgaatgcacaagagagcgccgatgcttttcttgcgcgattggcgactttgggttatgagccggtggcctatggcaaggcctctttcaccggggtggggcagcaggcacgtgtgcaggccatgaccaagccggatgacggtgccgcttaccggaccaagcagaatagcggttttggcacatgggtatgggtgtttcggcggtccgagcagagcaaacaggcgcaggaataccttataggcgactggataagtccgtttatggaggctacggaaagcaatacaagtcgcaggaagctagaagtcatgtcgacggtcactgagcattcggcggatatcggtgccgagctcagcgacaccattaccgtatcgggattccctgcggatcatggccagtatgccggcaacgaagagtatgagttcgcggcggatcggccgtatgcgacggtgagcgtatggtggtccggcgatcccgacaacccctccaacgatgaggcgtacaagccatctgggggagaggttcccacggaagacgacaaccaccggttgctggccacctgggagattcccgcgatgaacggcacgttcaaaatcggcgccggggcgttggacgcgcatggcgctcctatgtatctgaccgccgaacggcctgggtggtacgtgttcgtctggcggttcgagggggatgaccgtgtttccccggcgtccagccggtatgacgatgcctgggagcgtgtgcgggtgttgcccccatgcgagtcggagaaaccgtgcgaaccggagaaacccgagacgccgccggcgccggcggaggcaaccacgcccaaccctcgcccgtcactgcccgtcacgggtggcgatgtgtcgcttgcctcggttctggccgtgtcagctctggcgataggcgccatactgtccatcgtcgttcggtggcgtcgtcgctatgaccgattcaagcactggacgatgcgctggccgatacgttgacccgctgcggcatgatgccgatgatgtcggctggatggtgaaccacactccgcttctgagcagaagaacgggagctgggcacgaagtcgatcgtaacatacgacttgtgcccggcttccgcttcgttgagaaacttcacgcctgtcgcctcccgtggattagacaactgaagatccgcgatgaaaatgacgagacgtttatgatcgccgacttccctgggcaccgtagctgcctgatcgcctttcatccatatcgccacggtaaacggaaaggccgctgatttcggtaccgaaatcagcggccatataaccacgttcgtagcggggcatggatttgaaccgtggacctctgggttatgatcccgaccggtcaggcggccagaatcatagccggggccttccatgccccgccacgtaggcggaagtcgtcaacgttgacgacaggcaaacctccattccctcgaagttccgactgagttagatcagggcgcagtagcgtgtcaacggagacaccgaagaactgcgcggctcggcacatgtcgttgaacgaccactgtgcaccagtgttaatcatcctgttcaagttctgacgatgcttgcccatgtaggcagcaagatcactctgcttcaaccctctcaggctgagcatcattcggatgttcccgatggctacggcttgatagtcggtcgccaccgagggggctgtcattgtttcggtcatgccatcactataaccacttatgattacaaagtcaacacgccgataacttgcgagtctgtcatctcatggtgtatctgtaatcacatgcggttacaaacacagaaatccaagacatcgcagatcgtgcttgatctgctcagctcacgtggtattactcagtcggcgctcgccgacgagatcggaatttctcgacaagtactgtccaacaagctcaatggcatccgcagcttcaccaagcgtgattacgtggcgctcgctgactttttcaatacgagtgttgattacctcatgggtcgcactcttgacccgtggccggcggacaacccccaaccggaagaggcggcgaaatgagcgacaaaatgatgcgccgtaccctcattgtctgcgccggcgtgctggttctctgtggcttgccgatggttgtgatggccgtcgtgcaaagggacgtccgcatgggcctgtacggcgtgatgtccctgttgttcgcgttgagtgacgtgctgcaactgttcctcgtcggcggctgctgggcagcgccgtcgggccatgacgttcgcttcgagggcgccgccggccgttgggtatatgaagggcagctcagggccgacaccgtccgacacggcgtcattccagaccgctcgaatcatcaggagcggcatgagattctgcgagtcgagagcttcgatggcgacgtcaaagccgttcaatcgttcctgaacgagcatgacgccggctatatcgccgaggtcactcctgagcagcccatcatcgttgaagcattgggcaacaaggcatgcgtctacgtcaccaagatcgtccaatgcgagctgcgcgacgttctccgactgctggaggcgaaatgagtaacgcctatgagcgtcgtggcgcacagctcaacatggaaagcctttacatacgccacgacgtcatcagcgagcgcaaactggcaaggcttaaccccgaccgtccagtttcttttcgagccggtcaagccgtaagtcgatttggaacaacgcttgggcgatgtccgctaggccttcggtcatccgtgactcataggcatttctagtgcttgcctgagcctgcttgaacttcgtttccgctgagctcgcccagcttgcagctccacccatttgaatacttcctttccccgcatgcagcggattgtttgtgttgcagcttcaagcctacgcggcacggggaaagggccttatcttctgaaaggaaccctcatgatctggttcgtcatctccatcatcctgctgctcttcagcgccgccgtcaccggcgtcgcgctgtccaacaacgtcaagggggccggcatcggcctcattccgggcctcgtcggattgctgctgctcattcccgcatgcctgtattccgtggacgtgggcgaggtcgcggtcatccgcaacatgggcggcagtctggccggtcattccgaagacgcgggcttccattggaagacgccgtggcagagcgtcatcaaatacgacacccgtaacaacctcatcaacttctacaaggacaccgattacaagtacgacggcggcagcgcggtcggcaagcaggtcaccgtcaacgacaagagcggcgcttctgcagacatcgacatccaagtcaactacagccttgatccgagcgcggccgaatacctgtactcggagtacggcaaacagcagacgttcacgcagaactacatcagcaacgacctgcgttcagtggcccgcgaacagtccggccggttcgacaccctgacgatgctcaccaaccgaggcgagtacacgaaggccgtgcaggatgcgctggcggcgaagtggaagaagatcggcctgaccgtcgaacaggtcagcgtgcaggacgtgcgctacggcgaggccatcaccaagaagtacacggaggcgccggccgccgagatcgacaagcagaaggcgctcaacgagcagcaggtcgccaagaccgaggccgagacgaagaagatcaaggcgcagggcgaggccgacgccaacgccgtgctcaacgagagcctgaccgacaacgtgctcaaacagcactacatcgacgctctgtccaacgcggaccagctcgtcgtcgtccccgacggcgcggacacactcgtccagaccaagtaggggtggcggtcatgttcaagcgttatccgtacaccatcggcctgttgaccgtcatatcgttcgtcgtctgcgtgggatggctgttcactcacgatgcctgcatgcatccgatcggcaatggcctcgccgcgttctgggcgttcgtggaatgccccgtggtgttcgtcgcactgttcgaggaggccggcgaatgaacttcgatgcactcgtctggcagcagtgggtgatcctcggatacgcgctgctcgaacacttcatactcatcggcacgctgcgcgaaacgaaggtcaagccgggagcgcttgcgtaccagtcgctcaggctcgtcattctctgcgcgctcgtgctgaccatttaaggcttgcccgccgccattgcgaccttccttccgatgcggcgggcggcgacaaggaacaagtcgttaacaccacctctctcaatgatcgcgccgccggttctctccaccggcggcgcgccaagggcgggcaggttcgcccccggtcgagattcgcgtcaggtgggcgcgggcaaagaccgggaagccgttcgattcggccgccgtccactggggccgcgtcaacgtcggccgcgatccatccccatacgacaggaagtcagtggattgcggaagcgatggcgtgcgagccggtggtctccattgccggcgtcgaccacgccagcgcggccccgcaccaaacgaaggagtcccatgaacacccaccgcagtctcatggtctggcccatcaccgaacggggcctgaccatgacgcccggcgaactgatcgccgaggcgctggacgcgatctgcgaatgcaattcacggctcgactacccgcgcctcatcctcatgccgtcgcccgccgcgttcgtcatcgaccgaggcgcggcgaccatcggcgcggaatgcgaatgggcatggaaacgggacatcaggaaaggaacatcatgacatccaacgaggaaatggccgaaaaactcgccgagaagttctacggcctcatcgagggcgacgtgtccgtctccggcggtgagctggcaaaactgttcgtcacggcgctcgaccaagccggcctcgcattgagcgagaaagccaaggcctacatatccttcgaacctgtgctgcccaatggcaagacgctcgccgacatgttcgcctccagcgaccggaagccgctcggcaccgtcatcgacgacgaagacgacgaggaagaggacgacggcccggatgacgccggcgagcttgacgagctggagcacatgcgcgacgtggccgacatggcctatgcggcgctctccgacctcgccctgcactgccacaaccgtcgcgaagacgtggcatggggcatcgcgagcagcgcagccaaggacgcgcacgtcctcgccacgttcgtcggcgactggatcgaggacatggaggacgaggactagtggccggcgaaaccatcctcacgatcgtcggcaacctgaccgcagaccccgagctgcgcaccaccggcaccggcacgcaggtgtgcggcttcaccatcgcctccacgccgcgcgtctggaaccggcaggccaaccagtacgaggacggccagtcattgttcatgcgctgctccgcctggcgcgacctcgccgggcattgcgcccagtcgctgtccaagggcatgcgcgtcatcgccaccggccggctctcccaacgctcgtatcaggcgcaggacggcaccaaccgcaccgtggtcgaaatgaccgtggacgagatcggccccagcctgcgctacgcgaccgcgcaggtcacgaaacagggcggccacgacggctgtcagggcggcagcacctacggcaaccccgcgggcaacccgcccgttggcccacggccagccgccgcgccgtctcagccgccggcgtccgacccgtgggccaacggcggcagcggctacacaacggacatgttcgccgccgacgccggcgacccggaattctagaaaggacaccctcatggcaaagaaaaatgactctggacttgtccaggacgcgctcatacccgacgaaatgagcccgctgagcctgctggacttcaacagctcgtgcgcgaagatcaagcaggcggccgtggacttccgccgcgcggtcaaccacaagatgcagctcgaaaccaaagacgcctacctcgacaagttccaccagatcgacccgtacaccgaggccgtgtacgacacggacgcgctcgcgcagcacatcatcgactgcgccgaggtcatcaaccggctgctcacctatccgaaggacgcacgccgcgcggtcctgtacgacaacctccacgacagcctcgccacgttcgaggaaagcgcgcccgactatcccgatcccgacgacgatgctgacgagaccgacagaggagaggccgtcgatccgaccaccggcgagatcaagtaaccacacattgagagaggcttatatgcagcaggcaaacaaaaaagccacccgcgacggggtggctcaggaaaagatgtggtcgatatcagcgctccgacgtctcatcggttggcacgacgtctatggtttctgcgtccacatacgccataaagccgtccggcactccgtcattgtcgttgacgcacacaaattcatcgtcctcacgatctgccgtcagttcgacgaacttgcgcagctcaccgaacgtaagctgctcgaaatcaatcgtcacacacatgcagcgctgggtcttcttgtcgttgctcataagtcgattatcgcatgtcgtgaaggcggcgcgccatgtctgtgaacttcgacagcaccttcggtttcgatcctgcggtgcaggacagcagcatggccgcgcgcggactgtacgcgacgatggtgacgtggtgcgaccaccagatatacacgcggccggactcgttcgacggcaccttcgacctcaagcgcgtcagaagcgtgggcggcaccgtcagactcgtgcgcgaactcgttgaaaacgggctcttcgaggaggccggcgaaggcgtgtacagggtcgtgacccgtcgcggcctcgccgtgttcggcagcttcaagaaccagaagaaaccgcttacgcccgaagaagccgccgaactgcacgagaagaaggtcgtcgccggccacgccggaggcaaggcgtcgggcgagtcccgcagggcgaaagccgaagcaaacaggaagcaaaacgaagcagacgcgaagcagactgcttcaacttcaacaaagcaaacaggaagcactaccgtacctaaccaaaccaaaaccatgccttcttcctcccctgacccctccgggccgggatcgaagcaaaccgcgtcggtcgccgaggccgaggccagggcgttggccgacccgttcgccacggcgtggaacgcctacccacgccacaccggatcgcgacgggaagccgagaaagcgtgggccgcagccgtggccgggcacgacggcacgtccgccgtgacggaagcgcagctcatcggagccgtcatcgcctacgccaaaaccgtggacgaccccagatacgcgcccaacatgagccgatggctgcgccaaggcgcatacatggacaccatgcccagccagccgaaaccataccggcacgcactgcccgacggcaccgtcatcgacgaccggtggatcaccagccacatccgagaccacgtgcccgtaggcaccttcaccgacagcatgcgaaccgacttctgggcctgcgtaaaaaccggcatcgacccggagcaaaaagccgaggaaatcatcaacgaatgccaacgaaaggcgcaaagatgagcaccaaacccaccgatgaaacccgccgcatcgtacaacggcgagaccgataccgatgcgccatctgcgaccgggaaaccggcagccactggagcggcgatagcatccaccacagggaaccgcgaagccacccgttcgaccggctccaccaacccgaaaacctgctccaactctgcggcagcggcaccacaggatgccacggatgggtccacgcccaccccgcacgcgcctaccggctcggctacctcgtccacatgggcaaagaccccgccaccatccccgtctactaccgcaccggcggctggcagcaactccacacggacggcacacgccacccctgcccgccacccgaagacctccccacccacatcaacatcaagaaaggcaacgaatgaacacccaacacgacatcaccgcagacggccaaaccctcgacccgccgacaccaccccgcaagccgcacaagctgctgtggatcgacctggaaaccaccgccctcagccgcacggaagcgaaaatcctcgaaatcggcatgatcgtcaccaacctcgacggcaccgaagacggcgaccggctcatcctccccgtccgccccgaccatgtaagcctctacgacctcgaccccaaggtgctgcgcatgcacctcgacaacgggctcctggacaccgtcatggaaaccgaaccagacgaattcggatacgcgaacgtcgcccgcagcctcggcgaattcctcaacgacgaagccttgcgatacgagctccaccccgccggcaccaacgtggactacgacatcgacgtgctcaccagccaactcgccccctacctccaccccgactggctgcgggaactcaccaaccacaggaaactcgatttgagcacctaccggatcagcgacctcgccctcgaccacgacccctaccagggccacacgggcacccacagggtcgaagactgcatccacagggacatcaacgactacgccaactacctcgacatcatgcgagccggcatccaaggaacccaatcatgaacccccgcaaacgaatacccgcaaccctcacggcgatcctcgccatcctcgcgctcacggcatgcggagaaacacccaaaggcgacggccagggcaccgtgaacaaccccgaccccggatacgtccgctggtacgaactgcccgacggcagcgcggccgtccgatgcttctccgactccggcggagcgtcatgcgactggggacacatcgaactcagggacaagcaatgaacgcccacacagcaaccccggaccgccccaaccccgtcatcgaactcatccgacgtctccgaaaggccacccaccgacccgaaccggccaacgatccgaccatctgcgcgatctgcggcgcaccgctcaccgacagcacgtcatccatctgccccgactgccgggaactcgaaaaggactggtaagcatgcacaccacatgggccaacgaccccgtcaactcaccaaaccactacacacgctcgcacccgggcatggagtgcatcgaactgaccgcagacaccagcttctgcctcggcaacgccatcaaatacctctggcgctaccacagcaagggccgacccgtcgaagacctcgaaaaagcccgatggtacctctgccacgtcatcgaccacgacgagaagatcgcatggacacgccaacaacacgccatcctcgacaccctcgccaacgatcccgccatccccgacgccgaagcgcacacatgggcgaaactccggcaaggcttcccctattcggccctcgcctgcctcgaccgcctcatcgaacacgaaaggaaccaacaatgagcacacgcatctactgcgaccaatgcggcacggaaaccagcaaacgcgaagcgctgcgattcagcctgtccgggtattcggccaaccgtacctccatgggccagctcaacgacatcgatatcgacatatgccccgactgcgcccaacggttcaacgaccagaccatcggcaccatccacatacgccgagaccaccgagacaagctcagcccctacctgctcgaataccagcccaccgacccgaaagaagaccaagcatgaccagcatcatcaccaacgagatcgaggaacgctacccctacccagacaacggcgagcgcccgaccggcatcacccgtctcggccagtgcctcgcgtcgcgcaaggcgtacagggccggcgtatgccgcaagatcaccgatagggagatcgacgcggcggcgctcgccgtctacgccggcacttcgggtatgagcgttgaggaggtcttgccgttgtggccggacatgaacccggatgcgaaagcccagtaccggcttctggcgcggttggcgatcacggcagcacgagcggaggcgttgaagtgagtagtcagtattgcaagcccacgggttccgatccggtatggcgttgcccggtctgcgggcaatggtggcggctcgacctgccctgcggtgacttctgggagcctatgagcagtctgaccgcgttcatgctctaccacgcgcaatggaaggcggaacgcaaacacagaaaggcgggcatatgacgcgcattcggatcatgtgcgatcagacggacggcaccaccatcaaactcggcgccatcaaaaccgacaagaccggcgacacgatctactcggcgcaccccggcctcacgcaggacatgtaccgggacaccgtcaccctcgccctgctgcgctggatcgtccatctcgaacaattcagccaaatcgccaaccaaaccaaggaagacgcatgagcatcgacgtgacacaacaggcgttgaacgcgctcgccgacgccggactcggcaacgacagtccggccgaggcctacgtgatcggatacgcccaagggcatgacgatgcgctcgcgctcgccgtcagcatcgagcaagccataagcgccacgcccctcacccccgacgagatcgaacgactcgccctcgccctctgggaacacaacggcgagcgcccgaccgtgtatgagagcggcaagcgcatcgccgacagtgagctcgaatggtggaagcaggtcgcagtgagcgcatggagctttatcaacggaacggagaaggaacaatgaggaacggcagaccatacgccatcaagatcgcgaccgctgcggtgatcgccttcgcggcgctcgccgtcggttacgggctcggcgaacaagcccagctcggcgaacggccggcgcagaccgtcacgcaggagatcaggcacaccggcgacgtcaaacgcctgtgcctggccgtcaagaccggcgagcgcatcgacgcgatctcctgccaggtgatcgacgacatgaccgggagcctgacatgagcgaacagcaacgggagcaagtacgccggttcatcgcggatcgggtcggcgtcaccggcacgttcaccctcatcggcatgttctcatgcctgcccgcatggctcacgaaaggataccaagcatgaccaagcgaatacggctcacgcccgccatgcgcggcctgctgctcgacatgtacgagaccggcggcgcctgcccgctcgatcgcaaccaccggcgcacgttcgacgcactggaggaactggactacatcgaacacgcctcatggggacgatggcagatcaccccactgggcgaaaccgtcgccaaacaactagccaagaaaggaaaccggtaatgcaggtcagcttcaccgcccacgcgcccaatcacagcatgctcaccatccagcaacgcctcgaagcggccggcttcaccaacgtgcacgtcaacgccatcagcgacactgtggaacccttcacgcgcaccaaccgcgaaaccgtccaagcctacgacgaaggcaaacaagccatcctcgacagcgtgaaccatttcagcgacctcaacgacgaaatccaccgcaacccctaccgcgacggcgaccgatgaactggcgaaaccaagccacatgccgccaacacgacccggaactctggttcagcacccggccatccgaaaccaaaacggcgctcgccatctgccggacgtgtccggtcataggcgagtgccgagagtgggccgacgggcacgaccggatcaacggctacccgttgcagggcatatggggtggcaagcagtacggccggacgaaccggccgagaaaggaacgagaatgaacgacatcgacgttaacgtcaccacctggaagatcgggccggtcatcatcatgcgcggcgccgtcacgcccaccacgagggtggcgcaccccgaatgcttcggccggttcaccgtcatcgccctctcctgcgacagcgcgatccgcaagtgcatgcgccgcgtcgccatgatgtgcgccaagcactccgcatgcgaacagctcgaccggcaggaggcacgggcgtgagagtcaccgaaggcgtcaggaagatcatcgtggaatggcacggcaagggcgtgccgccggaagagaccgcgcgatccctgcgcatccccatcgacgaggtgaaggccatcatcctgcaagcccacccggcacccgcgccggaaaaacccgccggcatcggcgacaatagaagagaaagttaaggaaagtcagcaaaccgttgaaaacaagccgttcccggccaatccaccacgtcgggaacagcttcgggaaagtaaaagcccccacctttcggcagaggctcgcattgtccaacaagcgagtatagcaccagcgaaagggcggggatgatggaacaacgaacatgcgcggcctgcggcaaagcggccggcgccgcgaacctgtgcaaggaatgcgtcaaggactgggcgaaacgcctcgcatggctcctgaaggccggcatgccagccctccagcagatcgcctacaaacaagccaccacccgcgaacgctcgccacgccacggcaacagggcatacgcggccccgccggtcaacgaagccgcccaagccctgtactccgcagtggagacgcacctgcaactcaccggcggcatgctcggcgtcaaaccgatcggccacgaccgatacgaccggccccgcaccctcatgcaatgggccgacatcacccgcctgctgctgcaccacatgcccgacctcgcacgactcgacacggccggcgacctatacgccgacctgatccgcctatcggaaaaggtcgaaaccgccaccacgcacgccggcgagcgccgtcttgtcggcgtatgccccaactgcctgaacacgaagggggacgacgacgagccgatacgcacgccgatctacgccgcccgctccgcgcggtatacggtgtgccccgaatgcggcgcatggctcgacttgaagcgcgtgcggttggagtacctgcgcagcgcggggctcatgcacatcacgcgcacgcaggccgacgccgcccgatgggtgcgggagaacacgggtgtgagcgtgacgggcaaggacttggcgaactggcgcagccggggcaagatgccgtccacgcggcgcatcgaccggcattattgggagtggaacatcatggagctgttggcctgcgcgcaggatcgcgccgagcgcgacggcggcgacgtttgagcgtgagacggtttcgtgttacgctgtcgcgtgtaatcggagtatcggaaaagcctgtcccatcggggatgggcttttttcgtatccgatccccttggatggttggccgagcggtcgaaggcacccgcttgctaggcgggcaggcatgacaaccgacctcatgcttcgcgggttcgaatcccgcaccatccgccagccgccgccggcaccgtgcgcaaccggcgtatgcggcacccgagaaaccaccacagacagacgcctcgccggcggttctttcctcttcttcccgccggcgagcgccgtctgtcgatccgtacaggcgttcgattggaggcgtgcgtgggcaatccgcggtacagcaatggctatcgccgccggcgcgagcgcgagcggtggcggcacatgcgggccgactgctacatctgccatcggcccatcgactacgagctcaaggcaccgcatccatacagcttcgtcgtggacgagaccatcgctctggcgagaggcggcacgctcacgcacgacaacagcgggcccgcgcaccgatggtgcaacgccatcaaaggcacgcacagtctggcatgggcgcgcgagcgcgtcgcccagctcatcgcccagggcaaggccccgcagcgcacagagccaacccaatccgggccgatccgctgctcggactggttcgggggtggggagtagaccccacccggccccgccggggcgaccacgggcaaagcgccgtttttcccccgggcttttttccacactcgaacggaggccgtcttggtgtccagaacgtcgaaaacccctcgctcgaagagcgcgtcgaagtcccatagggtcagcaacgccgccgcttccggggatcgccgccgcctcctggtggcgatgcgcaacctgatcgccgaaaagctcgacgaagggtcgataagctcacgcgacctcgcgtcattgacgaaacggctcgcggacatgagcgccgagatcgaggcgatcgacaaggcgtcgaacgggcacgatccggccatgcaggccctggacacggaggacgaacgattggatgaacacgaggattgacggggcgagctgccagatcatccccgacgatttgtacaccagcggagagccgagcctcaacaggctcgccgcagcggcgggcgaccggttcgacgtctggcagcggcagatcaaccggatcatcctcgcgaaaagcgccgacggcttctggagcgcccgcaacacggtgctgtcgatcccgcgccagaccggcaagacctacgacatcggctggatcgcaatacaccgcgccgcccgaacccccggcatgcgcatcgtgtggacggcccagcacttcagcgtcatcaaggacacgttcgaaagcctgtgcgcgatcgtcctgcgccccgaaatgagcggtctcgttgaccccgaccacggcatatccctggccgccggcaaggaggaaatacgcttccgcaacgggtcgcgcatcttcttccgcgcgcgagaacgaggcgcattgcgaggcgtcaagaagatcgccctgctcgtcatcgacgaggcccagcacctgtccgactcggcgatggcgtcgatgctgccgacccagaaccgcgcctggaacccccagaccatctacatgggcacaccgcccgggccaagggacaacggcgaagcgttcacccgcctgagggacaaagcgcgcgccggccgcacccactcgaccctctacgtcgaattcaccgcagaccgcgacgccgaccccctcgaccgccagcaatggaggaaagccaaccccagctacccgtcccacaccagcgacgaatccatcgccaacctgtgggaaaacctcaccggcgacgacttccggcgcgaagccctcggcatctgggacgaacacgccctcagccaggccatcgaccgccgccaatgggaggaagccaccatcgagcgccgccgccccggcggcgtcatgagcttcggcatcgacatgaacccccaacgcacacgcctgaccatcggcgcatgcatgcgatacgacgacaacaccgcccacatcgaactcgccgaataccgggacaccaaccaagacggcaccatgtgggccgtcaacctcatcgacaagttctgggaacaaaccgccgcgctcgtcatcgacgggcaaagccccgccaccgcgctcctgcccgacctcgccgaagccggcgtcaccgtcaccgtcaccgccgccaccgacatgggccgcgcctgcggccgcctgcaagacatgcttagagacggcaccctcacccacctgcccgaagacggccaacaaccactctggcaagccgccgccaaagccaccacacgccccatcggcaaaaacggcctcttcggatggaaccgacccgacgacgacaccgacatcagcccactcaacgccgtcaccctcgccctccacggggccatgaccaccagaagagaccccaccgcacaacaggaagcatggtactaatcatgaacaccgacgacgcccccatcctgcgcggacaagccggctggctcgccatcgaaagcgcctacgccaacaccatcgccggcgtggaccccgacgaccagcccaccatcaacgaactcctcaaacaatggcgacgccactacacgcgcaacaccctgcgcaccagctactacctcgcccactaccactacaaaggcgtcgcctacagcatcccgccggccatgaaagcactcgccaaaccaatgatcggctggcccaacaaagccgtccgcgcgctcgccgacctttccgtgttcgaaggcatcgacgcgcccgacagcctccaaacgcaggtagacgacatcatcgcggcgaacacgttcggcgtgaaaatccaacaggccatcgtgtccgcatacacgcacggatgcagcttcatgaccatctccggcgccggcgacgacataaggatcacgccccgcgccgccgactggagcagcgccctatgggactggggcaacgacaggatcggcgcagccatgaccatccgcgacaaagacaaagacggctacatcacccgcttcgacgtatggctgcccggcaaggtctacctctgccgccgcaacagcggcacatggcaggccgaacgcatcgaaaccggcttcgaccaacccaccgtcgtaccgatcgtcagcgaccaacagctctaccgccccctcggctccagccgcatcacccgcccactcatggccctcaccgacctcggactgcgcaccctcgtgcgcatggaagcgaccgcagaattctacgcggcaccacgcatatggttcctcggagccaacaaaggacaggtaagccccgacacatggggcagcatcgtcagcgtcatcaacggcatccccgccggccgcaacggcgaaaaacccgaactgcgccaactcacacaggcctcgatgcagccacactccgacatgctcaaaaccgtcgccctcatggtcagcagcgaaaccgacatccccgtcaacgacctcggcatcaccatggacaaccccgccagcgccgaagccatggccgaagccgaacgcaaactctcccgcaccgccgaccggcaaaacaaacgcttcggcgaaagcatcaaaagcatcctcgccatggcgctcgccgcccaaggcgcggacgaagccgacatccgccaactgcgaccgatctgggcacccaccaaggaagccagcgacgccgcccgcgccgactggtaccagaaggtcgcgtccaccaaccccgccttcgccgacagcgacgtgggcctgagccgcgccggcctgacatgggacgagatcaacgcccatcgcgcctacgagaaacagcagcgcacgcagaacgccatcgacgaactacgcgccaagatcgccaccgccaagaccgacacgcaggaggccgcagccaatggacagcaacagcctgccgctgagcaacctcaatccggcgcagcgtaaagcgttcaacgggcacctcaacgacatgtgggacgactatcaggacgaactcgccgacctcatcatcgaagccaagacgatggtgcccaacagcctctacttcggcgatgatcccaccaccgaagcccgacgccaactggaagactacgcgcgcaaggccaacctcatcgcacaggactactacaggaacgtgcgagccgcatgggccgaagccgccggcatcggcatgcccgactacaaggaggcgcaggtcagctcggaccgagccttctggcagatcgtcggcggctacaacaacaccatgcacgtcggcgcgaaattcaccgacatcatcaacggccgaagcaaagccggcctgaccatggatcacctctgggccatcaacacgcagggctacaccgaagacgactgggcgcgcctcgccaaggacgtcatcaacgagaccgcacgcctcacaggacggttcaccgcccagaacgaccccacccgccccaaatacgcgcgagtgccccaaggcaagacctgcgcgttctgcgccatgctcgcgtccagaggcttcgtctatgccagcgaggacaccgccggcaaatggcacaaataccaccacgactgcgactgcaagatcgtcccctcatggggagagaccgagatcgacggctacgaccccgacaaactcaaggccatataccagcaggcaaagaacgccgccaaagcggccggagccggcagcgatcccaacaccgtgctctcgtggatgcgcagcgaatcgccggacatgttcaccgacggatcggaattcgcgccagacctgcgcatcccgcgaggcagcagactcgaacaacaactcggcgaagcgtatacccgccgcgtcaaccggctcctcaacaaaaccgagcacaaagacgcggcgaggctctgggccaaatacgccgcccaatacgacatcaaagaaacacggctgtccaaaggtgcttacttcagcccctccgacggcggcatccacctcaacctcgacaccgtcatggccggagacagcgcacaccgcccagtgcagaacctcttccacgaaagcggccacatgctcgactggctactcgaccgcaacatgtactccagcggtccgcaccacggaaccatgttcgccgacacgctcaacaaggacgcgcaaaacctctacaacagcacgcaagcgatgctcatggccgacggcaaaccatccgaccgccaacacgtactctgggaactcggccagcaagtacgtcgcggcaccgccaaaaccgaccgcaacatcgaagacatgctccaagccgcgctaggcgacgactaccccaaaaccgtaggacaccccaacggatacttccaacaacaaggaagccaccaatcatcggaggcattcgccgaaatgctcgacgcccagctcgccaaccccgccgcatgggccatcatcgagaacttcatgccggaatcagctaaaatgttcaatacgatgatccgggaggcgacaccatgagcgaagaggactacttcacccagcaccgaggcgaagacaccgacgatctcctagcccgctacggcctccagttcggcgaaccctacttcaacatcgaagacacaggcatcaacctcagcgaagccgaactgcgcgccgacctgctccactgcctctaccacaacaaacccaaagaccacatcggccagcccagccgcaaccttatcgcactggcgctcgccgactgatcccagccccggcggatatccgccggggctttttcatgcccgcagaccgggccaagagttttcagccacccgcacgggtggcttttttaatgcccggaaagggctcgaccacaaggagaacaaccatgttcctcaacctccagcacccccatatccgatacatcgccccgcccgccgaaggcggttcggacactcccgacgccaccccgccggccgaaccgaacggcaacggcgaggagatcgactgggaagccaaatacaaggaagcgctcggccactcgcgcgactgggaaaagaaggccaaggccaacaaggccgccgccgacgagctggaaaagctcaaggaatcccaaatgagcgagaccgagaaggccgccaagcgcacgcaggaactcgaagcgcaggtcgccgcctacaaggccaaggaacagcaggccgaatggaagacgcaggtatcagccaagaccggcatcccggccgaagcattgcgcggcagcaccctagaggagattcaggcgcacgccgacatcctcaaaccgctcgtgcacccagcgccgaagctgccgaacgtgcccaacccggcacagcaccccgaaggcaaaaccgccgacgaacgagccaaggcatacgtgcgcagcctcttcggcaacaaagactaaccgccaccaaccatctgaaaggaaccaaccatggcactcgacaccagcaaggtgctgctccccaaggaagtagccaccgtcatcaccaagcgcgcaaaggacaccagcaccatcgccgcgctgtccccaagcgaaccccagctcttcctcgacaaggactacatggtcttcaccggcaattccgaagccgaagtcgtcgccgaaggcgaacagaagtccagctacgaggaaaccctcaccccggtcgtcggcaagcgcttcaaggtgcagaccaccacacgcctcagcaacgagctccagtgggccgacgaagacgccaaactggagatcatcagcaagattcaggccgatcaggccgccgcgatgggccgcgtcctcgactacgtcatctaccacgccttcgaccccaagaagaaaacgaccctcgaaggcttcaacgcgctcgccaaaagcgcggtcagcgtgccggccaccgacgatcgcgtcgccgacatcgacagcctcgcggaggccgtcagcgacgagtacgacatcaacggcatcgccctgtccaagaccatggcgaacgagctgcgcaagatccgcgttccctccaccggccagcgcttctacccggaaatcccgatcaaccttcaggtcggcaacctcgacggcatcccggccgccacgtccggcacggtcaacggccggctcgtcaccccggcgaccggcatcctcgccttcctcggcgacttccgcctcatcaagtggggcatggtacgcgacatctggagcgagatcatcgaatacggcgaccccgacaacaccggcaaggacctcaagggcgtcaaccagatcgcctaccgcaccgaggccatgtacagctacgcgatcctcgaccccaagggcatcgccgtgctcaagaagccgacctccaccggcaggacggccaagtgatggccgcgcccctcacccagacgctcgtagtgcagaaaaccgacgaggccgacgactccggcctcgccatccctgtgcgtctggtaaagcccgacggcaccccgttcgccgaaggcgtcgccaccgtctcatgggactcgatcaccggcaagcccgcgaccttcaccccgcccgcgccgaccgccagcgcgcgcggcggcgtgctccagcaggcggccgaagcgcagctcgccgcatccgccgactcggcggccatcatcgcgaaggtcaacgccacgctgaccaagctcaaggccgccggcatcctcgcctaaggagaccccgcatggacggataccccagcaccccgctcaacctgtccgacggcacaaccatgacgcaagacggcgggggagaggacgaaacggacgacgagaagccgttcgcgcaagtcggcgacctcgaagcccgatggcacgcgctcaccggcgacgaacgaacccgcgccgagacgctgctacaggacgcgagcgacctgatccgcaccacatgcccccaatgggccaacgccaaacccgccacgttgaaacgcatcgcctgcatggccgtcaaacgagccatgcaggccggccccgacatgtcgggcgtgacccaatccacccagaccgccggcagctacagcgaaagcctgagctacgccaaccccgccggcgacctctacctcaccacctccgaaaaggaagcgttgggcggcgacggcgaggcatgggcatacgacatggccggaggcgcggcatgaaaggcgagaccatcaccctcatccaccgcaccccggccggccatgatcccggcggcggcatcatctgggacaccgaacaggaaaccgtcgaagacgtgctcatccaggacggcagccaatcgaacctcaccgacggcatccgccccgacggcatccgagtcgccaaaaccatccacatgccccgcgcatggccctaccggagcctgcgcggggccaaggcggtcatcgacggcgtcgcatacaccgtgatcggagacccccgcccctacacgggcggcatcaccccgacccgctggaacctcaccgtcgaactcgccgccaccagaggataggagaccggcacatggcaaaggtaaaactcaacctcgccggcttccgcgcggtacgccaatccgcacccatccagcaggccatcgaccaacaggccacgctcatcgccgccagcgccaacagcatggcacaggtcgaaggcgcgacctacgaggccgcaccccatgtcagcaccaccaaaggcagcgtcgcgctcgccacgaccgggcacggctccgaaggcaacgtgaaggcgatggaggacaacgcgaagcacaacacgctgctcaaggcggtgaaacggcgatgagtctcaacctcgaaaaaacggtcaaggactggatcgacaccgaccccaacggcgacggcctgaccgcatacctcgaagtgcccgccgaccggcccaagcggttcgtgaccatcgagcgcgtcggcggcagcgagaacgaatacagcagccaccccatcctcgccatacaggtatgggcggaaacccgatggcaggccgcccagctcgccaccggcacgctgctgccccgactgctcgacctcgacctgctcgaccccatcgccgccgtcggcgtggaaagcgtcatcgacttccccgaccccggcccgccgccccagccccgataccagatcaccatccagctcgacgccgccacccaataagacgacgccgcaccatccgaaaggcaccatcatggccgaaaccaaccacaacaacaagaaaaacgtcagcctcggcaagcccaagaagaccggctgcctctactacgcgcccgccggcaccgcactgcccaccgacgcgaccaccgcactgccggcagcctacacctgcgtcggctacctgtcggaggacggcgtcaccaacgccaccgacaccgacaccaccgacatcaacgagatgggcggcatcaaggtactgtccgagatcagcggctacggcgagacatggcagttcaacatgatcgaaaccaacgaagccagcctcaaactgcgtttcggcgccgcgaacgtcaccggcaccgccgacaagctcaccgtctaccacgccatcccgtccggcgaaagcctcgtcctcgtgttcgagatcgccatgaccggcaaccgcgtcaagcgcatcgtagtcgccgacggcaccatcaccgaattcgacgacaccacctacagcgccggcgacgccatcggctacggcgtgaccatgagcgccaaccccagcgacctcatcaacgggtccaccagcgtcgaatacatcgccaacgtcgccaccgcctcgctcagcaagtgatcccaccccgcgcccgccgtccggcgggcgcacccctctgaaaggacacgcatatggcagccaagcagccgcatgaccacaaaaccacgaaaaaccagcccaagaccgtcgaggccatgggcgtcaccctcgccgtcagccccgcgatcttcgacgacctcgacatggttgaatacctctacgacctccaaaccgcccagtccggcaacggtgccggcgcgttcgccatcgtccccttcctcaagaagctctgcggcccccagtacacggccatgaaggacgcattgcgcgaccccgacaccgggcgcgtgagcatcgacaaggtcagcgaattcatcgcccagctcctcgaacaggtcgccccaaactcctgacgctcataggaatgctcgccacggcacccgacgcgctcgaagcggacttccagcgtttctatgggcttaacaccgacctcatatggactggcgaactgcccgccaaccgggcggccgcactggccgccaacctcccccgccagtccatcatctggcaaaaactcaacccgcgcctcgcatgggacgaccaaacctacctcctcgccgacatccgcgacagcctcgcgttcctcgcctggacgaaaaccaaggaagcctcacgcaagggcgcgcgctggcgcggacaactccaacgccccggcaccgtccggcatgaagccacgggcggcgaggtcatggcgatggacgacgaacaactagccgcatacctggccgcaccgcgcaccaccatcagggaggcatagcatggcaatcgagatcgccaccgcgttcgtacagatcgtgcccagcatgaagggcgtcggcaaggccatcgaatcggcgttcggcagcgcatcggaaaccgccggcaacaccgccggcatcaaagccggcaacggcttcgccggcggcttcggcgcgaaactcggcgtcatcaccggcatcgcgcaaagcgtcgcgggcaaggccatcgaagcgttcatgggcctgtccggcgagatcaccagcgcatccgacagcgcccagaagttcgccagcaccctgaacttcgccggcgtcagcgaacagcagatcaaacgactcaccgccagcacgcaggactacgccgacaagaccgtctacgacctcaacgacatccgcaacaccaccgcccagctcgccgccaacggcgtgcccaactacgacaagctcgccgaagccgcaggcaacctcaacgccgtcgccggcggctccgccgacaccttcaagtccgtggcgatggtgctgacgcagaccgccggccagggaaaactcacgaccgagaactggaaccagctctcggacgcgatccccggcgcgagcggcaaaatccaacaggcactcaaggaggccggagcctacaccggcaacttccgcgacgcgatggccgacgggcagatcaccgcgcaggaattcaacgacgcgatcatgtcgctcggcttcaccgacgccgccgtggaagccgccacatccgccagcaccatcgagggagccaccggcaacctcgaagccgcgttcgtcaagctcggcgcgagcgtgctcgacagcgtcaaacccgccatcaccggcggcatgagctggatcgccgacggcgtcaccaacgccgtgcccgtcgtccaggcaggcatcgaagggctcatcggctggttccagcgcctctactccaaactggaggaaaacggcgcgatcaccgcgttcaaatccgcgtgggacaccatcagggacgcgatcatgggcgtcgtcaacatggtcatcgactgggcgcacatgatccctcccgaaggtctcgccgacggcatcaaactcgtcgccgacacgctcaactggttcatccagcacggcaaggaactcgcgcccatcatcatcggcatcggcaccgcgttcgccgcagtcaagggctatcaggcgctcaacagcggtctacaggcgctcaccggaaccatgaacacggtgacgaccgccgccaagggcatcagcaacggcatcatgctcatgatggacttgggcggcccgattcaaatgctcaaacagatgggctccagcctcagcctcgtcaagacggctcagaccgcgtggagcgccgccaccaaaatggcgaccgccgtgcagggcgcgttcaacgccgtcatagcggcaaaccccattggcgctatcgccgtcgccatcgcggccgtcgtggccacgctcgtctggttcttcacccagaccgaggtcggccgcaaggcatgggccgcgttcacctcatggctcacggacacgtggaacacgatcgtcgccaccgcgcaagacctatggaacgggctcggcgaattcctcgccaacctatgggccacgatcacaggtaccgtgcaatccgcatgggacggcatcgccggcttcttcacgggcctatggcagacgatcagcggcggcgtcaccggcgcatggacgtcgatcaccacgttcctgtccggcgtgtggaccggcatcagcacgaccgccacgacgatcttcaccgggatacgagacttcatcgtcaacgtgttcaccgtcatcggcgcgctcatcgtcgcacccttgcaggcgatccagaacggcatcaacaccgtgttcggctggatactctcgttcatcacccagcagatgaacagcacgaacaccgtgtggagcaccatctggacggcgatctacaacgtcgtcaacacgatcttcacgctgataagcggctacatctcgaccgcggtgaacgcgatccgcacggtcatcgtcgtgttcctcagcctcctcaagggagactggcagggcgcatgggacgcgatcaaatcgttcttcacgaccacatgggacggcatcaaagcgttcctgtcgaacatcctcgacggaatcaaggccgtctggaccaccgtatggaccgccatcagcacgttcttcaccgacgtgtggaacaagatcgtcgcgttcttcatgccgatcatcaacggcatcaggaccacgatcggcaccgtcctcaacgccatcagcggcgtatggacgagcatctggaacgcggtcaggtccgtcgcgtccaccatctggaacgcgatcagcggcgtggtgtccacatgcatccagaatgtgagcaacaccatctcgaccgtcctgaacgccatcagcggcgtgtggacgagcgtatggaaccgcgtcggctcgtacctgtcgaacatctggcacgggatcacgtcggccgtgtccaacggcatccaatccgtgtcgaacaccgtcggccgcatccgcgacaccgtgctcggcgcggtcagcggggcgggccgatggctgtacgacacgggccgtcaggtcatccaaggcctcatcaacggcatcggcggcgcgttccagtgggtcaggaacacgatcagcaacctcggcagcagcctcgtcggctgggccaagagcgtgctcggcatccacagcccgtcacgcatcttccgcgacgaggtcggcaaatggatacccgccggcatggcccagggcatcgacaaggccagcggcctcgtcgaggacagcatcgacggtctgaccgacatgatccccaccgtgagcctgaagaccgacaccagcatgctcgaaaccccatacgcctaccagacccgcatcacgggcggccggatggcctacacgatcgacagcagccaaggcgaatacgcgaccaaacaggacatcatcgacgccatcgatcaggcgctcagcagcggcatcacgctcaacctgtccgaccgaggcggcgaggtcatggccggcaagctcgccaaacccatgagctacgaactcaactacctcgccatgagaggccgttaaaaccagagaggaaagcatcatgctctaccagcgacgcatgcgcctgccgcatgtcgaagaccccacgctcaacggcgtcccgctggaacgcatgatgttctccctcgccgccgacggcatcaccatcgacgccaccaagcccacaaccagcacgcaggacatgcccggccgcgacggacaactcgacctcaccctcgaagaccccaccggggccgcgtacatgggcaaccgcgccatcacgctcagcctgtacgccatcggcggcgaagacgacatcctcgccgccaaaacccggctcgccgccctcgccggcaccatcgtcacgctctcatggcgcagcctgcccggcgaatacgagggtcgcatgagcctcggcgcatgggaggacaaatgggccggcccccgacagatcgccacgctcgtcaccgtgagcatcgacgtccacccctacctgatcggccgcagccgatccatcgcgctcaaaacggacgcgaacacgatccacgtcaaaggcaaccggccatgctggcccacatggacgctcacccccgccgccgacgccaagaccgtcagcatcaaggacgcgcacggccacaccctcgccatcgccggcacgaccgcgatcaccggccgcatctccatcgacaccgaccccgaccaccgggagctgcgcgtcaacggcaacctcatggccccaaccctcgaatccgactacttccccctattgcccggcctgaacatgctcaccctcaccggagccaccgccgccagtctcgcgtacaggccactcacactcatctaggagcacactcatgcgatacatgatcttcgaccgctggggcaacccgctcggcgacctgccctacgccatcaaagccatccgcaccagagccaccgacggcaccgacaccctcgacatcaccaccatcggcgagatcaacaaggacgaacgcatcgtcttcaaggactcgatgggccgctgggcggaatacctgtgccagtccacccagaccgcccgcgccgcaggcatgcccgtcaccgtcgcctactgcaccggcagcatcgcggaactctcgcgcacctatatcgaggacaaacgcaaccgcaacgcgaacgccaaagcctgcctcgccaaagccctcgaaggcacccggtgggcggtcggcaccgtcgagaccggcaccatcaccggcacggccgacctcagcttctaccactgcaccgtcctcgaagccatccagaagaccgccgacacctacgggctcgaagtccagaccgaataccagcccgacccgaccggcaaccggatcggccggcgcatcatccacctcgtcgaacaccggggctccaccaacaccacgaaacgcttcgaatacggcaaagacctcacccaaatcaaacgcgacatcgacagcggcgacgtcatcacccgcctctacgggtggggcaaaggcatcgaacaaaccaacgaccaaggcgaggccaccggcggatacagccgcaaaatcagcttcgccgacgtcaacaacggcaaaccctacgtccaagacgaccaagcgctcgccgactggggcatcgtgggagccgatggcaccagacaccacagcgaggcaagcgtggacttccctgactgcgaagaccccaaggaactcctcaccctcaccaagaacgcgctcaaaacccgcaccacgcccgtcgtctcctacacggccgacgtgaccgccctcggacaagccggctacagcgcggaaggcacggacgtcggcgacagcgtgcagatcatcgacaccagcttcaccacaccattgcgcctcgaaggccgcatcctccagatcgaggaagacctagccggcagcctcgccgaaaccaagatcaccctcggcaacatccgccaaacctacacccaacgcctcgccgcccaacagcaggccctcgacaaactcgtctccaactccggcgcatggaacagcgccgccggcggcaccggcccgtacatgaaagacctcatcgaccgcatcaaccagatcatgaacgccaccggcgggtacacatacctcaaacccggccaaggcatctacgtgtacgacaagcccgaagaccagaaccccacccaatgcatccacatcggcggcggctactggcgcatcgccgaccacaagaaagcaaacggagactgggacttccgatcgctcgccaacggcaaaggcatcttcgccgacaccctcttcaccggccgactctccgacgcagcaggcctcaatttttgggatatggacaccggcgaattcagcctgtccgcgcaatccaccataggcggcaacaaggccggcagcctcgccacccagacccaagcccagaagctcgccaccgacgcgcaggccggcgcgaagacctacgcggaagcgatcatggcctacgggtcgaatctcgtgcgcaacccgctcggcgaccccgaccacgacctcgacaggcttggagccgccaaactcacgaataccatgccggcagcacacccggaaggcatcacgagcgcgatccgtttgggcaacgtgcgcgacacgtacttcggatggctgctcgactcgttccgtggtcacacgttccgcatctccggctgggcgtaccgcaaggccggcagcgccaccagcagcttcggcatccactggacggacaccggcaacggcaaccattggcaggccatcgccaatgccgccgccaacgccagcggatggacatacgtgtcaggcagctacacggtgccgtcgaacgccaagaccgcccgactgtggatgcaggtggaccgcgacaccacgaccgcaagcgacgccgactggtactggaccggactgcaatgcaccgacgagaccgccgcccgcagctacgtggacaccttcgaaggagaactcacccaaacctatatcttcaacaaactcaccaacaacgggcagatgcagggcatatacctgtccaacgggctgctgtacatcaacgcgacctatatgaggaccggcatcatcaccggcaaacgctcatactggaacctcgacaccggccagttcgccatgaccgacgccaacggcaaagaaaccgtccacttctccggcgaaggcggatctaacctgctcacgggcacgttccagaccggcctgtcgggcaacagggtgatgataagcccctcgttcaaccagtccgaggtcaccggcacggacaagttggagggcgcgggcatccagttctaccacggcaccaacgcggccaaacacccgtacatcgcggtcgagtccaccacgcagcaggagggcgaggtgtcctcgctcacgttcaacggcgggcatcgcgcgcggaacgaccccggcgcgttcggacgcatcggggagagaaaggacaacgccggcagaaaatacggcaccgtctatttcgctgccaatagggactacgacgagcccgccgccggcaatcaggcgggggccagaatcatcctggatgcgtacccgtacaccagccccgacacgttcgcggcgctcgaggcgttcgacggcaacggaacggtaggcgtgaaggccgacatcaactccggatacctgtacatgggaggtttcttgggagggtatgcgtccagaggcacatttcagtcgatgtactgggatgggacccaccacatcagcccatggatggtatttcggttcaagggctcgtggacgccgccgagatacggcagctacaagatcgtcggcggcgtcaacaacgccgccggcgacgctctgtgcaccagcgccccctgcaacgagagcagcagtggggccgagatcatggtccagtcgatgcccgcgaacgtcggcggctacagcatgttccccgacggcggcgccaacatctggtgcacgatgttcggatacctgaggaaatagtggaggaaccatgcgaatcatcggagaccggctcttcatcgacctgccgggaagcggcgaaccatcgccggacgggcgcatcgacggcggcacggcatggggaacccatttgacggacatcgccgccacgggcctgctgctcggcaccacgtccgacatggagaccgtggccatgatgctcgatgtctcgaaacgcgtcgccgaccccggcgtcatcgacgcggagtcaggtcgcaacgcgtggacgagcgcctacgagcagttggagcacgacgcgctttccgaccgcaatcaggttcgtgccgcctcgctgcgccgcgcgttcacgcccaccggggccctcgcccccgacgggcgtgcagagacccgccggctgttgggcctggaatccaccgtcaccgacccgtatgaggctgacgcggctctcgccgccgcgcaggcgttggacgaacccccgacggacgagccggtggaaccgtcgatacggttgcccgccggcatggacgccacaagcctcgaaaccctgctcgccgaacacgccgcggagatccaaaccgcacgtgaaaagttcatcagcgcggtaaccccaccaatcacagacaggagataaccccgattcgtcgaatcacccaccaacaccaacaacagaaaggaccacgactagtggacgacaaaaacctctacccggccatgatcggcaaactccgcgaaatgctcgccgacagcaccgtgcaaatcgccgcactgcaagcccagatcgacatcctcgccaaggaaaaccaacgactcaccgaccaactcaacaaggacgacaccaatggcaacgcttgacagcttccgcgaagccacaggcgaacccatccaactcgacctagccaacggctacatcgcagacatacgcctcaacgccggcgacatcaacggccgcaccatcaccgtcgaactcaccgacaacggcacccccatcaccagcaccgacggaatcacctgcgcgctcgcctacaacaccacgcccggcagcgggctgggcgaccgcgtgagcatgccggcagtgttcggcacccccacggccacgtaccgcgtcgccgtgccgcgcaaggcgttgcagcgcgccggcgcgatcctcatgggcatcgaggtcagcgtcaacggcacgaggacctgttcgcgcaacttccacggcatcgtcgaacgagccgtgttcgacgcgaccgcgcccgacgcgcaggatcagatgggcgtgctcgacaagctcatcgacgacgcgaccacggccatcaacaaggccgtcagcgcggccggcgaggccaaggacgcggccgacgcggcacgcaccagcgtgatcgaataccggcagctctccgacgactgcaaggccaagatcgcggccagcgcggccgcaggcgtggtcttcgccactcaagccgagatcgacgaacagtacgacaccgtgatcgcgcccgcactgtccgacgccgaaacgatcccgccgctcacccagtccgacatcgactgggcgctcgacatcatcaaccgataaacaggaaggagccatcatggcgaacacgcagaaggtcatgaccctcgccgacaccgcccagctcatcgccaaggtgcacgccaacgccgccaagggcgtgcgcttcgagtacgacggcaccaagggcgaatacggcaacatcgccgcctacttcgccgcccacaaggacggcaaggtgtacggcgtgaaattccccaaatacacgtacagcaacacgccaaccggcgtgaagacccgagacaacgccaacctggccatcgagatcagcaccaacgacaaggccggccgcgacgactacgcgcccctgaacgccttccgcgtgtgggacgtgaacgccaccgtggacgacgacggcgtgccccacgtcaccgccatcgacggcatcgacacccgcttcaaacgcgacggcagcaacggcgacgtgtacgtcatgacatgccccggatactacaagctcgacagcacgagcacccacaacgaattcctctacagcgacacccaatacgacggctacacaccattgcccggcgtgctgctgcccgacggcagcaaacgaccatgcctgttgttcgcgaaatacgccgcctccctcgactcccagcaatgccccctgtccgtcagcggcaaggagatcgaccgcgaattcggatcccagaaccgagccatcgactacgcgctcaaaaaaggcaagggctacgccggccgatgcgccggcgacaacttctacatccagctcatgctcatgctcaaatacgccaccaaaaactcggacgtgctcggcggctgctggcagtacacgcctcagaccgccgtcaccaaggccgaaaccggcgtcaagcgcgtcatcatcgccaccagcagcgccggcaacttcgacatcggcagcaccatcaacatcggcaccgacaaggaacgcaacaacaccggcaactacagcgccgcccgcgcccgcaccatcctgagcaagaccaacctcgacgccaacaacaccgccctcaacctcgacggcgacgccatcaccacgaccaccgcatgcttcgtcagcagcatgccgtggaagaccggggccaccgacaagctgctcggcaccgacggccgcccatccgccgcgttcgccgccaaccaccaacccatccgcctacagggcatcgaactattcaacggcatctacgaaagcgacgccgacctcatcgtcaacgccgtcaaggaaaacgacgacaagggccgactcgacatctaccgcgtgttcgacatcaccaaggccagcaagacatcgacggcgaactacaccaaaatcggtgaattcacaccacgcaacaagaccacggacaactcatggcgatacgccgaggacttcaccctgtccaatggcgtaatcatccccacgggactgggtgcgacgagcaccaccggcatgtgcgacggcgtatacgccaacccgctcacatcccaaggcctccgtcaggtgcggcgcttcggcgacctctgggatggggtgcagttcggcgctttcgccgcgtacctcagggccgacctcgcgggccgctggtggaccgtcgggggccgcctttctgcgctcggtcgcacgagggcgtagccgcagtgcgatggggggtgaagcgcagcgagggggcgaaagccccctcatgacgtttcgcagccttttgggatttgtggcggtacgcctccgacgtccgtgcgtggtgcagcgcttcggcaacctcagggatggggtgcagtacggcgctttcgccgcgaacctcaggaacgacctcgcgaaccgcaggtggaacatcgggggccgcatatccggtcaatcctgtcaacacgatcattacgccacaactaccctccacgccagccagtgagagggcaagccacggcccagccgaaaatcaaaccgagcacccggccagtagacccgaacccatccagcaccgtcgaacgccggcatagtccagataggaaacgctctgaaaacccattgcaagcacacccgctgcgccacgcccatgttcgtccgcagggcgattgaccactacctcaaaggcaagcgatcgcgccgagacgtcacccggttcctcgaaacccaccccgacctagaccgcctcgccagccagatcggcgacgagatacgcgaaggccgataccgcgacacccggatcgcatacttcaaccgcatcgaaccgatcagcggcaaacaccgcgtcatcggccgcgaatcggtcaggcaccaaatctacgaccatgtggccgtcatggccctgcaaccgttgttcgacgcgaaggtgggacgatggcagaccgccagcatccccaatcgcggcaccatcgacgcccgccgcgcgatcaaacgatggacacgcgaacgcagctcgaaatggttcgtgaagctcgacgtgcgcaaatactatcccagcatcgaccgcaccaccctgaaggcgatgctcgcgcgcgacgtcggcgacccgatcctgctgcgcctcgtgttccacctcatcgaccggtaccaaggcggcaacggcctcaacatcggcagccacctgagccaatggctcgccaactactacctgagccacgcctaccactggatcgaatcgccggccatgaccatcgaacgcaccagccggcgcaccggcgagatcacccgccgcaggctcatcacgcaccaactgtggtacatggacgacctgctgctcatcggcacctccaaacgagatctgaagatcgccgcccgccgcatcgttcgttacctcaaagaccggctcggactcgacgtgcacgaggaatggaactgcaaacgcctcgacctcgaacccatcgacatggtcgggtacacgttccgaccccacggccgcgtcaacatccgcagcggcgtgttcctccgcgcccgccgcaccttcaaccgcgcggcccgccggccgatgaacgagtacatggcgcgccgctgctgctcctactacgggtacctgcgcaacagcgacagcgtccaataccgacgcaggcaccgcatcgattcaaccatgcgccgcgcgacccgatacctcagcgcgacgcccaccacacacaggaaggcaccaccatgctccagacggtatccagccccgaacccctcgaagaggtcagctactacccgcgcggcgacggcctcgcggacatccgcatccgccgcaacatcgccaccgtcatgcacgaggacggcgatgccacgtggacggaatacaccgccgacgaagcctataccgtgcgcgacctgaccgaacaggaagccatcgaacaggccgacagcatttggctcgactgtttgcaggcgtccaaatcggacggtcaacgactcggcgccctcgaagcgtcaagcctcgatcaggacgaggctctggccgaaatctaccagcttctggcagggggtgaagcatgagcaaagccatgatccgcgtctacgcccgcctcgtcatcgccggccgcaagaccatcgacgacgtgcccgaagcgggccgcgaagccgtcaaggagtacatcgacgccctgggcgaagaggggaacgaatgaaccccatagcccagcagctcaccgtctgggccgccaccggcatcatcaccgccctgggcggatacatgctcggctggtggcgcggctaccgacgcaaatccgacgccatgcagaccggcgtgcgcgtgctcctgctatgcaagctcgaacagatgcagcgcaaaatggtcgccaacgacggcatcgccgacaacaccgccaaacggaccgcgcagctcgtctacgacagctatcacagcctcggcggcaacggccacggcacccaagtcaatcaggacatacaggacgcgccgatcgcccccaagaaggtttagccctcgccggacatcccggcgggggctgtttcatatgctcatccaccacgtaggaaggaaaacgaatttttgggcaagttcaagaacaaaagcaagccgctacaggccctcatcgcggcattcgtggcaatgctgctcgccgccacgccggccatcgccatggccgacatggtcggcatcgacgtgtccggctggcaggccgcgaacgtgacctgcaccgccagctacgacttcgccgtcgtcaaggtcagtcagggcgtcggcttcgaaaactccagttggcgtacgcaggccaggtgcgcggccgaccagggcaagagcctcggcctgtaccattacgccggcggcaacaacgccgaggccgaggccgactacttcgtcgccagggcgagggactacgtcggccacgctgtgctcgtgctcgactgggaaagttaccagaacgcccagtggggcaattccgattgggtgcgccggttcgtccggcgtgtgcacgcgctcaccggcgtgtggccgatggtgtacgtgcaggccagcgcgctcagccagataccgggcgacgtcaaggccaactgcggcctgtgggtcgcccagtacgccagcaacgcgccgaccggctaccagagccgaccgtggaactacgcgatctacggcgaggccatgcgccagtacacctcgaacggttgggtcaacggctacaacgggccgctcgacctcaactacttccgaggcgacgccggccaatggcaggcctatgccaaccccgcaggcgcggccaagccggccacgccgccgcagaccgcgacgcccccgacccataccatcgacctacaggccctcgccaccgccacgatcaggggcgactacggcaacggccagcagcggcgcgacgcgctcggcgcgaactacgacaaggtcatggcgatcgtcaaccaacgcctcaacgccggcgccgccacgcagacgccgcaggccacgacctccaccgcgacacgtgtgaccgtccgctctggtgacaccatgagcggcatcgcctcgcgtaccggcctgtggccgctgtccaggtggagcgtgcccagtggcaacctgaacctgatctaccccggtcaggtcgtcacctacaacggcggcggcagcgtcgccaccggcagcaacgcgccaccggccacccgtaccgtgaccgtccgcgcgggcgacaccctcagcggcatcgcggcgcgcctcggcatcagctacacgcagctcaccggctatcgcagcggcaaccccaacgtgatctaccccggcgaggtgctgcgctactgagcgctaacccgaaccctacctaggaaccttgaacccgacaccgggcgaggttcctaggttcatatccagagaatcgaggacaatatgaccgacgaaaacaccgaacccaagaccgccggcacggagccgaccgtgcccgattggctgctgccgaaccgagcctatgacgtgctcaaatggctcgcgctgatcgtgctgccggccatcggcgtgctcgtgcagacgctcggccccgtatggggctggacgtgggccgatccggccgcgacgaccatcaacgccgtcgccctgaccatcggcgtcgtcatcggcgcaagcaccctcaaggccaaggcatccaaggcctgacataacaaagcccccgaacctaccgcactcacggtatggttcgggggcttttcgtcgtttatgggctaggcgtggatcgtttcgcggcgtcgcgtggtgcgcaggcggtcggcgatccatgtgttgacgacggcgttgcggctgatcgccagatcggcggcctcctcgtccagttcgccgaccatccatgcgggcatcgtgagcgtgatgcgtttttccagcggggggtgatgttcgaccacgggattgctcatgtccacgtagtcgaggatgtcgtcgccgttgtcgaacatctcctcgagctggtcgctggtgatcgccttggcgtcgggcttagtcttggctgtcatagtatgcctcctcgttcttgcgtgatctgcgcacggatatgatgcggatgcgtttgccgcgcttggtggtgatcgccgtccagtgcttgccgtcgatcatgccgagcacgatgtagcgcacgtcgtcgttgccgggattgggagcggtcagcgtcaccgtcttcgagttgtcccacatgcgctgggccgcctcgaagtcgatgccatgcttggcgaggttcttcgcgctcttcgccggatcgtattcaaactccatcaaacctcctaatacgtctactatacatcaatatgacatcaatacaacatcatgcggcgaggcgcgtggcttccactgcggcgcgcaggcggtcgtcgggcatggcgatgtaccgctgcgtggtctcgaccgaggcgtggcctaggagcttggagacgagcagcaggtctcgtgtgatggcgtaggtcgttgtcgcgtacctgtggcgcaggctgtgcgccgtccatccgtcgcccaagaggtcgctcaggtgtcggccgacgtaggatgattcgacgtggccgctccaccggccggggaacagatagccgttggcggatcggatcagcaaagctaggtcgtcgccgatgggcacgatgcgctgcttgtcgcccttgcccacgaccacgaggctccagcccacgaggtcgcgcatcacgtcgcggctgtgcaccttcgctatctcgaagcgcctcaaaccgcattccgcgccgaggcgcagcatgagccgttcgccgtccgtggccttgcgcagcgctgcgagtatcaccacgtccgggcacgggcggggatgcggctcgggacgcttgacggtgggcaggaactcgctcggatcggcctcgctgcggccggacgctttgagccatcggaaatatctgacgcaggcgttcttcgcgcccttgcgtgtctccggcttccagtccttcgcggcgaagtgcgcgagcaggtcgtcgccctccacgtccctcggatcgccttcgagcgccctcgacaatgcggacatctggcatcggcgggtgccgatcgtgttgggggagtagcccgcagccttgagggagtcgagccataggttgattgattctgcccagagcgggcttggatgttgttttttcacaggacatcatcgccccgatcggatatgcggccccgtagggcacgacggcggataaacgaaaggccgccacgaataatcgtgacggcctcgcccgcagtagcggggacaggatttgaacctgtgacctctgggttatgagcccagcgagctaccgagctgctccaccccgcgtcggcttgtctctcagacagctctatctacaataggtgcagattccagaaagtcaacatcggcgtgtcgcgtcatcttcccgcggttttaaaacgtgaattggctcacgcagcgaggggtttggggcggagtcggagtcggggtaataacgcgccataaatggccgttataggaatgccctgaaccgttatcccgaatattgacataataggaacatgcctatcaagatccccagtggcctgccggccagagatatcctcgattcggagcgcatcttcgctctggagaagcccgaggcggagcgtcagcgcgtccgcccgctcaaactggtgatcctgaacttgatgcctaagaaaatcgagactgaaacacagctgctgcgtctgatttccaagtcgccgctgcaggtcgaaatcgacttcatgaagacctccacgcatgaggccacgcacgtttccgccgatcatctcgtcaagttctacgaaaacctcgatgcgttcaaagacaactattacgacggttttgtggtcaccggcgcgcctgtagagcatatgccgttcgaagatgtggactactgggacgagttcaagacgattctcgactgggcctccacccatgtgttctccaccatatacctgtgctggggtgcgatgggcgcactgtactaccgctacggcatccacaaggtggattaccccgagaagattttcggcgtattcccgcagtacctgcaggatgaatactgcttcctgaccaatggcttcgacgagattgatctgcagccgcactcccgcctcgccggcgtgaacgaaaacgaggtacgtgccaaccatgaccttcagatcttgacttgggggccgcagtccggcccgggcctgatcgccacgcgtgacttctccgaagtgttcgcgctcggccattgggagtacggcaagtacacgctcgccgaagaatacgagcgcgatatggccaagggcatgaccaacgtgcccttcccgaagaactacttcccgcatgacgatccgaagctggaaccgttgttcgcctggcgcgcccacgccaatctgctgtggcgcaactggctcaactgggtgtaccagaccacgccgtatgacctgaccgaggtgccgcagctcagggctgagaagaagctcggtactgatcgttcgattcggcatgagccgggcgggccgcgccaggatgatttcaagccgtttgtgcatgacgggtatggggtgattcagggctgagcctacgatctcccctcagtcgcctacgacgacagctcccctcgacggggagctcctttgcttctccttcacggctcggcccatcagagggagctactgttggaggttgcgttcgtagcgtggacggttgttcgtccacgatgtggacggcttgatgaacgtaatgccacacatccgcgtaatgcgaccaatagtgcacaacgttcgcgaaacgcccgggaaaaccttgcagcagtagggatttcaggagactcgccggtataatattgacattgtctagacgcaggcaaataatcactcttcagtcattcggagccgaatgcccagcgcagactccgtgtccatgcccggcagactccacaccgaggagacaaaaaaagacgaaagtaacgagcacgtcacatttgcctgcccggtgggtttaaactgacacctgacattgaagaagcaggaggcgtgatatggtcggttcgctcagcgcaggattgctgttggctgacgaggcaggcgctcatctgccctcggttgatgacttccttcccccggagattctgttccagggaactccgtttgccatcaaccgcattattttgattcgtatcgtggcaaccatcgtgctgttggtggtgctcggcgtgaccgcaaagcgcgccaagctcatccccggccgttggcagggcgtagtcgagtacggtctcgacttcgtgcgcgacaaggtcgtgtatgacgtgatgggtgaggcccgtggcaagcgctacgtgccgatgatcaccaccctgttcttcacgatcttcattttcaacctgtgcggcatcattccaggtatgaacatggcggccaacgccacggtggtcatgccgctcgtgttcgctgtctggacactgatccagtactggatcgccgccatccgctcgcagggcctcggccactatctgcgccacgagctgttcacccccggtgtgccgtggccggtctatttcctgctggctccgatcaacctgcttgagctgttgatcatccgcccggcctccctgaccatccgtctgttcgccaacatggtttccggccaccttatggtcgccacctgcctggcgttcgcacagttctggatggttgacgcggtcaacaagctgcagggcatcccggtgggtgcgctgtggttcgccggtggtttcgccatgacctgcttcgaggcgttcgtcgccttcctgcaagcctacgtcttcgcgattctttccaccgtgtacatcaacctgagcttcccggaagagtgacgggcgactaacccgccgcttccggtccccggtctgggaaaatcgcagaccgaccaaaccccaagatttataacgtcgccaagtacgttagaaaggaaacacaatggatatcatcaccctcgcagaggtcgccggcaacctgtccgtcatcggttacggtatcggtactcttggccctggcattggtctgggcatcctcttcggcaaggccatggaatccaccgctcgtcagcctgagatgtccggcaagatccagaccatcatgttcatcggcctggctctggtcgaggtgctggcactgatcggcttcgtcgccgccctgatcatctgatctgcgcagatcaacagacgaaaaccgattatgtccatcactgaaaggagggcttgatgacacaagcagcaagcgggattgacctgttcattcctgaggtttatgacatcgtatggtcgctgatcattcttgtcatcgttgcggtgttcttctacaagttcttcatgccgaagttcaatgcgatcttcgacgagcgcgccgccaagattcagggcaacatcgccaaggcggagcaggctaggaaggacgccgacgaggccaaggccaagtatgaggcccagctgagcaccgcccgtgtggacgccgccaagattcgcgacgacgcccgtgcggaagcgtcccacatcatcgccgacgctcgttcccgcgccgagtccgatgcggcccagatcaccgcatccgcacagcgctcgatcgaatcccagcaccagcaggccatcgtctcgctcaagggcgaggtcggcgcacttgccaccgccctggccggcaagatcctcggtgccaagctggaagacaacgacgtgcagtcctcgatgatcgattcgatgatcgacgacctgggcgccaagaagtgaccgtgaccatccgtaaccagaaagggaggtgaccatgcgaggagaggcatcacgtattgcagaccgcgagtcgcgtgattcgctggccccgaaactgcgcgacacccgtgaggacgcgtggcggatcggcaacgaactgttcacgatcaccaaggtgctcgatgacagcattcagctggagcgcgcactgaccgacccgtcccgcccggttgccgacaaggtggccgtcctgaaggaactgctcggtgacaacgcgcatccgatgaccatggagatcatgactgacttggtctcccgccgttggagccgtgcgcgcgacatcgccaacgcagtggaagacttcggcgtggacgccatgatgtactacgcggacgccactgacgccacgctgcaggtatccatcgagctgtccgagctgcattccgcactgctgaacctgccggtcgtacgcgccaagctgtacgactaccaggccaccagcgaggcccgtgtgaagctgttccgcgaggtgttctctggcaagaccctgaacaaggtcaccatgaggctcgccgaacacgccacttgcaacctgcgccgccgccgctacttggagaccatccagtggctgatcaacaagttctcccgccacatgggcgagtcgatggtcaccgtgaccaccgccaccccgctgaagaaggagcagatcaagcgactggtcgaggtctactccgccaaggtgggccgtcaggtgcacatcaactcggtggtcgacccgaccgtgctgggtggcatgcgcatccaggtgggcgacgaagtcacggacaacaccgtggtcgcacagctgcagaacctgcatcgcaaggtgcagacggaggcgactccggcctgaccggccgagccaatccgtccaacaccacacacaagcaaagacttgactgaacaataaccaatagaaggagtgatcatggcagaactgaccatcgatcccgcctcgattcgcaaggccctcgacgacttcgtgtcgtcgtacaagccgagcgacacccccacccaggaagtgggctatgtcgccacggccggtgacggcattgcacacgtgacgggattgcctggttgcatggccaatgagctgctgacgttcgaagacggcacgctcggcctggcgttcaaccttgacgcccgtgagatcggcgtggtgatcctcggcgatttcgctggaattgaggaaggccaggaagtgcgacgcaccggcgaagtgctttccgtgcccgtcggcgacggctatctcggccgcgtcgtggacccgctgggcaagccgctcgacggcctcggcgagatccagggcattgagggtcgtcgtatcctcgaagcccaggcccccgacgtgatgcaccgccacccggtcgacgagccgctgtccaccggcctcaaggccatcgacgcgatgaccccgatcggccgcggccagcgccagctcatcatcggcgaccgccagaccggtaagaccgccatcgcgatcgataccatcatcaaccagaaggccaactgggaatccggcgacccgaagaagcaggtccgctgcatctacgtggccatcggccagaagggctccaccatcgcctcggtgaagcagagcctggaagacgccggcgccatggagtacaccaccatcgtggcctccccggcagccgattccgctggcttcaagtacatcgccccgtacaccggctcggccatcggccagcactggatgtacaacggcaagcatgtgctcatcgtcttcgatgacttgtccaagcaggcagaggcctatcgttcgatttccctgctgctgcgccgcccgccggggcgtgaagcctacccgggtgatgtgttctacctgcactcccgcctgctcgaacgttgcgccaaggtctccgatgacctgggcggcggttcgatgacgggtctgccgatcgtcgagaccaaggcgaacgatgtgtccgcctacatcccgaccaacgtgatctccatcactgacggccagatcttcctgcagtccgatctgttcaacgccaaccagcgccccgccgtggacgtcggtatctccgtctctcgagtcggtggcgccgcacagaccaaggctctgaagaaggtctccggtacgctgaagatctccctggcacagtaccgttcgctggaatccttcgccatgttcgcctccgatctggatgcggcttccaaggcccagttgacccgtggtgcccacctgaccgagctgttgaagcagccgcagttccacccgtactcgccggaacaggaagtcgtgtccgtatggaccggcacccacggcaagctcgacgacctcgacctgaaggacgtccttccgttcgagcagggactgctggactacatcgaccacaacaccgatatcctcaagaccattcgcgagaccgaggaattcaccgccgacaccgaggctgccctcgataaggccgtggacgagttccgttcgacgttcgtctcttccgccggcaagccgctggtcgagaagaagccggacgttgacaaggccgcgccggtcgatcaggaaaagatcgtggcgggagaaaagtaagccatgggctcgcaactcgcattgaaatcacgcatccgctccaccgagtcgttggcgaagatcttcaacgctcaggagatgatcgcgtcttcgcatatcgccaaggcccgtgatgtggccctgaacgcgaagccgtacaccgatgcgattttcgatgccgtgcaagcgttggtggcccacacccatatcacgcatccgatcgcggtgaaggacgagaagaacccgcgcgtggctgttctcgccctcacctcggatcgtggtatggccggcccgtacacctcttcgattatccgtgaaacggagtcgctgctgtcccgcctcgatgcggcaggcaagcagccggagctgttcgtgtacgggcgtcgcggttcgacgtactacaagtaccgtaatcgtgacatcgcggcgacgtgggaaggcaacaccgaccagcccggcgtggaaattgctgaaacgatctccaacaccttgatggacgcctacatgaagccggctgagaagggtggagtttccgaactctacatcgtctacaccgagttcatcaacatggtggtgcagaaggtgcgcgtgctgcgcatgctgccggtcgaaatcgtgaaaaacgagaccaaggtgcccgatcctgatgaagaggcaccggctactgcggatgtcgctccgctgtacactttcgagcccagcctcgaaaaggtactggatgcgattctgccgaagtacattcagtcccgtatccacgagtgcctgctgaccgcggccgcgtcggaaaccgcaagccgccagaacgccatgcacacggcaaccgacaacgcacgaaacctgatcgacgaccttacgcgcaagctcaacgcttcccgccaggcctcgatcacccaggaacttaccgaaatcatcggcagcgctgacgcgctgaccaagaaggaagagtaggaacgcatatggctgacaaccagaccactgcggccgagcctaccaacggtcgcgtcacccgcgtccagggctcggttatcgacgttgaattcccggtgggtcatctgcccgacatctacaacgccctgaaagtaacgatcgtcaacaccagcgccaaggaagaaggcgaggcgaaggagaccgagatcaccctcgaggtcgaacagcacctcggtgattccacggtccgttgcgtcgctctgaagcccaccgacggcctggttcgtggtgcctccgtctccgacaccggcgccccgatctccgtgccggtcggcgacgtgaccaagggccacgtcttcgacgtgtccggtaacatcctcaacaagaagccggatgagaccatcaccgtctccgagcgttggcctatccaccgcaacccgccggccttcgatcagctggagtccaagacccagatgttcgaaacgggcatcaaggtcatcgatctgctgaccccgtacgtgcagggcggcaagatcggtctgttcggtggtgcaggtgtgggcaagaccgtgctgattcaggaaatgattcagcgcgtggcccagaaccacggtggtgtgtccgtgttcgctggcgtcggcgagcgtacccgtgagggtaacgatctgatcggcgaaatggccgaggccggcgtgcttgagaagaccgcactggtcttcggccagatggatgagcagccgggtacccgtctgcgtgtcccgctgaccgcactgaccatggcagagtacttccgtgacgtgcagaaccaggacgtgctgctgttcatcgacaacatcttccgcttcacccaggccggttccgaggtgtccaccctgctgggtcgtatgccttccgccgtggggtaccagccgaacctggccgatgagatgggttccctccaggagcgcatcacctcgacccgtggtcactcgatcacctcgttgcaggccatttacgtgccggccgatgattacaccgacccggccccggccacgaccttcgcccacttggatgcaaccaccgagctttctcgtgacattgcctccaagggtatctacccggctgtagacccgctgagctccacctcgcgaatcctcgatccgcgttacgtgggccaggctcactacgactgcgccaaccgcgtcaaggcgattctgcagcgtaacaaggagctgcaggacatcatcgccctgatcggtatcgacgagctcggcgaagaggacaagaccaccgtgaaccgtgctcgtaagatcgagcagttcctcggccagaacttctatgtggctgagaagttcaccggtcgccccggctcctacgtgccggccgacgagaccatcgaagccttcacccgcatctgcgacggcgtgtacgacgacgtcccggagcaggcgttctccggcatcggcggcatcgacgacctcgaagagaagtggcacaacatgcagaaggaactgggtgcgtgatggctgcggaaaaaaccacgatgaaggtcaacatcgtcgccgctgaccaccctgtgtggcacggcgaggcgacgagcgtgaccattcccgcctctgagggcggcatgggcatcctgcccgaccatgagcctgtgctcacggtgatcaagcagggtacgctcaccgtggttgagcccgatggcgatcgccacatgttcgaggtgaccgacggattcatttccttcgactcgaacaaactcaccgtggcggtcgagcgcggccacgacgtccagtactccggcaccgccgagtgacctgaaccaactccttaaggggctctctggttttccagagagccccttttgctatgtatgccatgtgttgcgctacagtggtggcctatgcgagttattgttgccgactgttcggccgagtattcgggccgcctcaacgcctcactgcccctggccaagcgcgtattgctgatcaaggccgattccagcctgttgattttctccgaattgggctcctacaagccgctgaactggatgaccgcgccctgcacgattcgtgagatcgacccagccgccaaatccgcgcaacattcccgggaaagtgtcgctggtggggctgtggatggtgattctgcgacgcattccccggaaagtgtcgccgctggtgagccggaaaaggtgctacgtgtcagcgccgacaagggttcggacattcttgaagtgacgctgcagcatatctattccgaccaaacctatgatctgggcgaagatccgggtctcatcaaggatggcgtggaagaccatctgcagcgctatctggccgagcaaatcgagcgtatcggcaagggagccaagctggtgcgtcgcgaatacccgaccgccattggcccagtggatattatggccgtgaatgccgagggcgagcatgtggctgtggaaatcaaacgtcacggcggcattgatggcgtcgagcagctgactcgctactgcgaactgctcaatcgagatccgctgctggccccggtgcacggcatcttcgccgcacaaaccatcacgccgcaagcccaggtcttggccaaagaccgcggcttcacctgcctcatcctcgattacgacgatatgaaaggcaccgaggacgacagtctcaggctgttctagatatagcaggggctccctcatcagagggagcccctgctatatcttttagtacgcggcgagaatatcgattacgaagaccaacgtggagttggcgggaatcggaccttgctccttatctccataggcctgatccggcggaatcaccagcagaacctgagagccgacggtctggccgaccagacccttctgccagccctcgataacctgatgctggccgctggaatcgctgaacagatcggcgtcgattgtggaatcgcgatcccaggacgaatcgaactgcttgccattcgtaagccaaccggtgtacttgaccaccacggtgttcttgtcggtcagcttggcgccgttacccttgatcagcgtctgcgagatcagcgaatcaaccgaaccctgaccgttcatgtcgatggacggctcgccgtttttggctcgcgtcaccttcggcagattggccggcacatccttgacttcctcgccagtggccttctccaagtccttggacttggacacaaacgtcatcgccagaatgtaagagtacccggacgaatcctgagcgttgacgccaaagccaatcgtggtgttgatcttggcacccttgatctggttgtagtaggtcgaggagagggtcttggaatccaccttcagcgagcaatccggcgtgttcttggtccaggtgtccatgagctcggttccgtctttaacgttgagcgcgatgccttgggcgcagacgcggtcgccctcctcgatcacgtcgccatcgcccttctgcagcaccacataagagccgtcggacacggtcatcggcgtattaaaggagatggtcggcttctcgccgagcttgcccttggcggtcacgccggcaatttggcccttcttgtcagaagagtcggaagatgaagaggaatcggaagaagaggatttcgagtccgagctcgaactggagcaggcagccagcgacacgcacatcgccagcgagcaggcaagggcaacggccttgccgaggggagataacatagacttaacagacttacgcatgacacatcaccctactggtaaaccttgattttctgcgctcctaggtaataaacaggtgaagattgtagaatggttgagttatgagtgctgaagaacagactacaagaccggataagggcgccaagcgtccatcccgtcatgccaaaatcatgcgtggagtggtgacgcctatcttcggactattggccgtggcggctgtggtgttggggtacatgaatgccacgatgtggaagccctccactgaaatcaccgcttccgcaaccatgagcggctcccggtatgtcgtcactgatccgaatgtgctgaccttgttggatcagaatgccacgataaccgtggactcgggatcctctcaggacgaggcgtgcgtggcgttgggttcgtccaaggatgttgccggatgggtcgcgtccgagaagtcctatacccgcatcaccggattggcatcatggagcgagctgagcacccagaagggaagcagcacgagtcagggagcgcctaccagtgccgatgacgcggtgtcgttcaaggattccgatatgtggactgccgtgaaatgcggcactgggtccgtttcgctgaagagcaagaagaccggcgcctcgacggtagccattgtggatttgggcgaaaatgtcaccaacgccaaggtgcagctgcactgggtgcgctccgaagtgccggactttgcgatgccgttctatctgtccggcggattgctggccgtgctggccgtactgtgcgcctccgtgttcgccatgccgccgcataagcgccgcaagcgcatggtggaaggcatggcaagcgccgtaatcgaggaagaggcacccgccagcatcgcagtgtccgggaagccggatggtgcaagtcgacgtaatcgtcgccgtcacgccacacatcggcgttcgggccgtgcgtcctcgcaatcctcgcaatctgaagccaccgaaacaccggttatcatcgacccaagttcgcgtaacctggtcgccgaccagcagaccggtgccgaaagcggcgctgagcccggcctcagcgccggcgataacgaatcgacttcggtaatcacccctgacgaactgcaggcctacttctcccgcttggcccaagaggtcaataccggagacgactcggccgatgacggacaggaggaaagctgatgaacaagcgatggaacaaactgtgtgtgtccgccctcgcctgcatggcgttggtcgtgccgttgaccgcctgtgaaggccaactgccgacgccggctgctgatacctccaccaaggttgcgccggatttgaccgaggcgcaggagaagaagattcgtctgaagattctcaagacgatcgatgaagccgatcaggccaagaatcccgatgggtatgcgaccgttatgggcgggccccagctggacattcgcatcagccagaccacgatcaatcagcgtggcggcggtatgtccgaatatgcgaccattcccaaggacatcgcccagacggtgattcctacggacgacggatggcctcgctcggtgttcaccatcacgaccaccaccgaagatcagcagtccaagcgtttgctggtcttcgatcaggaatccgcccagcagaattacaagctgatggctatggctcgactgtttgagggcgccaagctgccgaagttcgagattccgactattggctcgcagatgggcaccgcaaaggatgagaagctggtggccgctcccgccgatgccttggcccaatacgccgatgtgctgcagaacggctccaagagccaatacgcttccaagttcgcagacgatttgctgcgccaggaactggccaataccacggccaaggtgcaggaaggtatgcaacgcaacaacggtacgcaggagcaaaaattcaccgctgtgcctgaacagatgtgggtgatgcgtgctgcagacggtgccggtgatctggtggttggccgtattaacggcgaatggactcgcaaggcaggggatggccgcgaatcgcagccggcttccgacgacgagaaggcgctgttcaatagcgacaagtacaccagcaccatgaaggtcacgtatgtgaacgtggtggccttgtacattccgttggcaagctccggtgagcaaatcaccgccgtgggcgccgaccgtcagccggtaaaggtcgaagcgctgtagtcgttgccgccgcccaccgcgcggttaacgccccaccacgatatgattcatccaccacgatgtcggtaaagttttacctttcgcacaatggtgccgttttgagtcacatcgtggtgggcgttttgctacgtggtgggaatttcaccgcgtagtggaagaatccctacgtggtgggaatcggcattacaatcaatgtcagcaaatgtgattgttgttgtacgcgaatcgcgtggaatcgggaggcattatggcagagcagcagttcaatccgggagtctcattggcgggcgccgtcgatttggaggcgctgaagcatcaggtcaaggccgagcccggacaagcgggcggcgcgcctgccgctggtgggtacgtgatcgacaccaccgaaaacaccttccaggcaatggtgcagacttccgcgaccttcccgatcctgctgctcctgtgggtgccgaccgatgaccgcctgttcccgatggcccgtgcactgggcgacgcggtgaacgccctgaacggccagattcagctctcccgtatcgatatctcgtccaatccctcgattgcccaagcgctgcaggtgcagggcgtgcccgcactgttcgcgttgattgccggccgtccgatgccgctgttgcagggccttccgggtgacgacgagctcaagcaacttaccgacgaggtgattccgaagatcattgaggccgccgcgcagtctggtgtgaacggtaccgcgccgtactcgggtgatcctgattccgatgccgccaagagcgctggtgccaccggtgccgtcgcgggtgctgagcaggtgccgccggagcatgccgaagcccatcgtttggccgaggagggcgattacgccggtgccgccgccgaatacgagcgcgtgctcgaatccgacccgtccgatgcactggccgcccgcgaacgtgcgaaggcgctgttgctggcccgctccggggccgctgatgtacgtgacgtacgtgccgctgccgccgcagcgccggacgatgtggaagcgcagttggccgtggctgatatcgacatgatcggtggccagattcaagacgctttcgaccgtttgctggactttttggccgccgggcacaaggccgatatcgagcaggttcgcaagcgtctgctcgaatacttcgccatccccgaacccaccgacccgcgtctgacccgcgcccgtcgtcgcctagccaccctcatgtactaagtggttttggctcccctctttgagaggggctgtcgtcgtagatgactgaggggagctcacgagcgtactcgattgctcccccctaaaccatccgattcttcccgaaatactgctggaaccttggcccctccagcgccagctcctccttgaaatcatccgcccacttacagaacggacggttggcgagaccatcgttattgaatcgcgcctgatcggtgatttcggtgatgcagaatttcggaatcgtcagattggtaaccggcccggatcgttcggcctcggctacgatgagcggcgcattcggcccgccgaacacatccacgctccagccgtcttcctcaatccacacggaataccggttcttgatgattaccgagccgccgcgcttgatgagttcggccgcgatacgcgtatcgatttcgcgctcgacttcgtagcgcgtgccgcccacggacggacctttgacggtgacatatgcttccgagaaccggtcgcggtattcgtccagcacggccaccggatttacgtcgggcgtcatgtcgacgtgaaccttgcgcgagaccagccgcacgcgcaaggcgtaattgtcggcatgcacgtagtagctctgaatgatgagggtcggggcgtcgccgtcgtcgtattccgccggcagttcgcggcagaagaagcggcgttcgtattcgaagtcatctgtaggttccgacataaccccattgtagagccgataatggcgattatctcgttattttggcgacgtatgtgccgcatgcaacgtgatgtggtgtacagtaaagaagttgctcgggtttgtagctcagtggatagagcgtctgtctccggaacagaaggtcgtgggttcgatccccatcaagcccaccagcatggctttcggctaaccgccggaagccttttgcatattcggcgcgtgcaaggctggtgctggtgtcggcaatggcaaggccggtgatgccggctcgcttgggtcgtggaaaaaccgtccggtttggcgagaacggtagccgaatcgtctggaatcgtctggaatcgtctggaatagcaaggaatagtctgttgatggccgtatgccgagcatcatgcgcgctaaacgcgactttgctcagtagactgctacgtaatcggcattgccaatcgttgccgatcgtgcgattggtcgtagccggtggtgatgtgtaccggcgccggccgcagcaggtgggcgcccccaagatgagaaggagcacaatatgagcgaaaagatggaagccgtagccacttccgaggcgccggccgcgctgggcgcatacagtcaggcggtgaaggccaatggcttcgtgttcgtatccggccagctgggcattgatccggccaccggcgaactggcgggcgagaccgctggagagcaggctgcacaggcgctgaagaatattaagcacattctcgacactgccggtaccggcattgagcatgtgtgccgcgccaccatctacctgaagaacgtcgaggacttcaaggaagtggacgcacgttacgctgaggcgttcatcggctccgtcaagcccgcccgcgtggcctttggcaacaacatgattcccaagggtgcgctcgtggagatcgacgccatcgcggtggagtgattcgaacgtttccccggcggcccgtctgcgcgcatggtgtgtgcagacgggctgccgcgtattgtgcgacgcattccggggaatgtttcgctgggcgggggtgcgaggtgtggttccgcggcacgttcccgggaacgttgcgctggaatcgttgggcggtggtccgtgccacaatagagaccatggcatccaaaggaaaaccgtcgccgcgttcggccgtaagcccgctgagtgatgagcaggtcaagcgtctggccgtccgccacacgcttgtggactcgacacagtattacccgaccggcccccgcacgcccaatcagccggaaatcaacgcccagaatcccaaggccaccaaacgactgctgggaggggtgtccattgtgttccgcgccagctgcaagaccaaggcctggggcttggaacaggtgccggaaaccggaccgttcatcaccgccgccagtcatgtcaccatgtttgatgtgttcgtgccaatgatgagcctgttccacatgggccgccgcccccgttacatggccaaggccgagatggcgaagtggccattgatcggcaagtggttccagttggtcggcatgcagccggtgcagcgtcattcgggcaaggccaagcagatcgaagagacctcgattgatattctgacgtccggccgcccgctgacggtctggccggaaggcaccgtgacccgcgacccgaaaaagtgggtgatgagcattaaggagggcgtgggatatatcgcccttgaatcctcgcgcagactggggcatcaggtgccgctgtacccggcggtgacgtggggtgccgcctccatcaaccactggtggccatggccgcgcaaaaacgtggtgatgtgctatgaccatgcgctcgattactccgatctgcttgccgacatggactcatggggtgaagagccgcctgccgaggccgtgaacgagctgatgtggcgcgtgctcaaacgcatgaacacagtactggaggaaattcgtggcgagcagttccccgctgaaggctactgggactaccgcagtatgagtcgtaagccttggcctgaagccggcggcccgttcccggctgagaagtagccgcaccggttcccgtacggggagcctaggcgagtagcatggcacaagattgtgccgatgaagttgcgcgacaagcgaaggtaggaatttgatatgggtaaaaatataacggttctcggtgcaggagcatggggtactgctttcggccaagtgctggcggacgcaggcaacacggtgaccatgtgggccaaggagcagcagattgtcgagggcattcgcgatcaccaccacaacgccgtgcgcctgccgtccgtcgaaaagttgccggacaacatgaccgccactggggatcgcgccgaagccgtcaagaacgcggacatcgtagtcgtggccatcgccgcgcagttcgcgcgagtggcactcgtcgaattcaagggactgattcccgatcacgccatcgtcgtcagcctgatgaagggcatcgagcgtggcaccaacaagcgtatggacgaagtcgtccgcgaatcccttgacttgccggccgaccggttcgccgccatttccggaccgaacctgtccaaggaaatcgccgatcgtcatcccgccgccaccgtggtggcttgcacgaacctcgataatgccacgaaggtggccgaggcatgcaccacctcctatttcaagccgttcgtgaccaccgacgtcatcggcctggaaatgtgcggcagcctgaagaacgtgaccgcgctggccgtgggcatggcccgtggtgccggctacggtgagaacaccgcagccatgatcgaaactcgtggactggccgaactgaccgcgctgggcgtagccgctggcgccgatcccaagaccttcttcggcttggccggtgtgggcgatctcatcgccacctgtggctcttcgctgtctcgtaactatacgttcggcgcgaatctcggcaagggattgacggtcgaagaggccaccaaggtcagcaacggtgtggccgaaggcgtgcccaccacggatgcggtggtggctcttggcgatcagcttgatgtgccgaccccgttggcgtatcagatgagccgcgtgctgaacgaaggcatttcctgctcggagatgcttgccggactgttcggtcacgaggttaccggcgaataacgagagaagcgacgtatacgtggcgtatacgttgtacgtgcaaagtcgcgtggcgtatacgtcgttgacgtgcacgagtagactggtgtgcgtctcttgtgcgcggcgttccgagcgcggttcggtccggttggcggtgcaaagcataggcttgaaaacggttgtagtttcaacaaaaggatggttatggccaagaagcgtgttgtggtgctctatggtgggcgtgcagacgagcattcgatttcctgcatctccactgccggtgtgctgggggccatggacactgaacggttcgagccgattccggtcggcatcaccaaggacggcaagtggatcatcaatggcgaagatccgcgtggctggaacttggacggcggcgagctgccgaccgtaaagatcaccccggaatcgcgcccggtgatgcttgacccctctcgcggacaggacggtttcttcatcggcgagcccagccacatcaattccgccgattccggcttcggcaccagcttcgtcagcatgtccgacccggaaatgcaccatgtgctgacctcccttggccatgtggacgcggtactgccggtgctgcacggcccctatggcgaggatggtacggttcaaggcctgctggaaatgatgggtgtgccgtacgtggggtgcggagtgtttgcttccgccgcctgcatggataagcattacaccaaggtggtactggatgccgccggcattcccaccgcgcccggtgtgacggtcgatgcgcgcaacttcaccgccgccgatgtgcttgccgagatcgaggacgccggtcttacttatccgctgtttgtcaagccttcgcgcgcaggctccagcttcggtgtgaccaaagtcgagaaagccgatgaccgcgagacccagcaggatcgtctggccgccgccatcgccaccgccggcgagcacgactggaaggtgctcgtcgaacaggggattgatggtcgcgaaatcgaatgtgccgtgctgtgtccgaaggccggtgacgagcccgaggccagctggcccggcgaaatcgtgctcgatcatcagaacgacgaccagttctacgatttcgactccaagtacatggatgcctccgccagccacgtggaagtgcctgccaatctgccggtcagcgtgcttgaggacgtgcgtgacgtggcccgtcgcgcgttcaaggccgtggatggtgccggcttgagccgtgtggacaccttcgtgacgcctgatggcacggtgatggtcaacgaaatcaacaccatgcccggcttcacgccgatttccatgtatcccaaggcttgggatgccaccggagtgagctacaccgaactcatcacgcgattgattgagggcgtgctgaggtaagtgtggtgcggaatcggccgcaggccggttccgctattgacacatcgcccatacctgtcagtaattcatgccaagttttcctaagttcaacaggcgtacagcaaatggcgaacgcaattcacttgcgcgccagtgtcaggacagattaggcgcatagtttcttttcttggattcacgggccgcgcgaatgccgcgcataccaagcccgactccccagactgtcgtctggatgatgttgagaaaaggaacattatgaacaacctgcgtaagatcgcggccggctccctcgccgccgtgctcgcgttctcgatggccgcctgcggctcgagcaacgcctcctccgatggcactggcgaaagcaccggcaaggccgtcaccgtgaacgaaaagtccgccaaagccacctccctcgccgacttcggcaccatggaagacctcgagaaggccgccaaggaagagggcgcgctgaacgtcatcgcccttccgcacgactggtccaactacggcgaggtcatcgagagcttcaagaagaagtacccggagatcaaggtcaccgagctcaacccgaacgcctcatccaaggaagagctcgacgccgccaagaccaacaagggcaccgacgccgcccccgacgtcttcgatgtcggccaggccatcgccgccacctccaccgactacttcgccccgtacaaggtgcaggcctgggacaagatcccggacaccgccaaggacgccgacggcgcctactacgccgactacaccggcatcatgtccgtgggctggaacgccgacaagtacggcgacatcagctccctggacgacctgctcgacccgaagttcgccggcaccgtggccctcaacggcaagcccgccgaggctggcgccgccttcaacggctacctgatgaccaaccagctcgccggtggcgacatcaacaacctgcagcccggccttgactacttcaagaagctcaaggaagccggcaacctgaccaccgtcgacgtgaccaacggcaccatcgactccggccagaccggcgtggtcttcgactggacctacaaccaggcctcctacaagaaggagctcaaggacaagggcgtgaactggaagtacaagaccttcccgaaggcccaggtcgtcagctactacaaccaggccatcaacaaggacgcgccgcacccggccgccgcccgcctgtgggaggagtacctgtacaccgccgacgcccagaacctgtggttcaagggcggcgccaacccggtgctgctcgattccatgaaggaagacggcaccgtcgaccaggccactctgaaggacgccatcaccatcgaaggcgagccggtctcctacaccaacgacgactccacccgcatcaccgagtggctccagaacaactgggacaagacgatcggcaactgaggcacagaccgatgaccgccgcaatcgcacccattgcatcgaacggacctgctgccgccaaggctgcgggtccgtccgctactcccgcttctcctctctcctcggcgatggccaagcaccgccaggagctgggcacgctcgccaccacgctcccgttcttcgcctacaccgcctgcttcctgctcgcacccaccgtcatcgtgattgtcggtgcattccaggatcgcagcggcaacttcacgctcgcgaacttcaataagatgttcgaggccaacaccatcgccgcattcggcacctcgattctggtgtctttagcatcctctctgatcggcgcagtggtgggcgcgctcgcttcctacgcactggtcattggtgccaagccgaacggcctgctgcgtcgtatggtctccgccatctcctccgtgcttgctcagttcggcggcgtgatgctcgcgttcgcgttcatcgccaccatcggcatcaacggtatcggcaccatgcttatcaagacactggccggctacaccgtgaacccgaactggctcagttcgttgccgggcctggtgaccatctactgctacttccagattccgctgatgatcatcatcttcctgcccgcggtcgattcgatccgtccacagtggcgcgaggcatgcgaatccctcggtggcaacacgttccagtactggacgcgcgtggcctgcccgattctggcaccccgcttcatctccgcgttcctgctgctgttcgcctccgcgttctccgcatacgcgaccgccgcggccctgttctcccagcgttcgattctggtgccgcttatgatccaaggtgccatgcgcaacgaactggaccccgaccagcagggctttgcccaggtgctggcattcgcaatgatcatcgtcgtggccatcgtcatgctgttgagccacgccgtggaaaagagggccggacgttggcaatgaccgaaacttccgcaaccaagccgccgcagctgcgcgccgctcgtgcgcgtaaacagagcatcatcaaattcgtgatcctgttcgtcaccctggcgttcctgttcgtgccgctgctggccatgctcatcttcaccctgcgtcacccgctgtccggccgctggtcggccgcgccgtggatcgcgattttcaccggcaacggcgagtcgctgggtgccgacctgaccgtgctgtggcagggcatcggcacctcgctggccctgagcgcggtcaccgtggtgatcatgctggtgctgctggtgcccaccatggtcatcgtgcatattcgctccaaggttttggagcgcgcgatcgaatgggtggccacgctgccgctgaccatcccggccatcgtgctggtggtgggtttgggcccgatctaccgctggctgtccgccgacgtgctgagcaccaacccaatctggctgtgctttgcctacgtgattctcgtgatgccgttcgccttccgcgcgatcgccgtggggcttaactccatcgacgtcaagacgctggtcgaggcatcccgctcgctcggtgcctcctggcccaaggtgttcttcaaggtgatcatcccgaacctatggcagtcgattctctcggcatcctttatctccatcgccgtggtgctgggcgaatacaccgtcgcctcgctgctcggccgtatgaacctgcaggtcgcgctctaccagctcggccagtccaattctcaaatctccaccgccatgtcgctgctggctctgctcttcggcgtggtgctcctcgttgcgctcgacctgatctccgacgcaatgcgcaagtcaagggaaggtaagtaacctgatgaacagcaattcgattttcacccgtcgccatgccggtgccgatgccgcggcttctgtttcggcacccgcccccacgtccgctgccgccgaggacgccttcaagaacgaccccaccgccaccctcgaaggcgtgcgcggcaaggacgtgaccaaggccgccaaggccctgctcaaagacagcgccaagcgcggcggcggctccatccagatgcgtgacgtcgtcaagatctaccccggctccaccgtgcacgcgctcgacgacttcaacctggacatcaagcccggcgaaatggtcgtgctgctcggcggctccggctgcggcaagtccaccgcgctgcgctcgctcgccggcctcgaagacatccagggcggccgcatcatggtcggcggccaagacgtcaccggcgtgccggtcaacaagcgcgagatggccatggtgttccaggcctactcgcttttcccgcacatgaccgccctggagaacgtggaattcggcctcgaagtgcgcggcatgggcaaggcagaacgccgcaagatcgccatggaacagctggagctcgtgggacttgccgatcaggccaagaagtacacgcagcagatgtccggcggccagcaacagcgcgtggccctggcccgcgcgctggccgtcaagccgcgcgtgctactgctcgacgagccgctctccgccctcgacgccaaggtgcgcgtccagctgcgcgaccagattcgccgcatccaactcaccaccggcaccaccaccgtcttcgtgacccacgatcaggaagaggcgctggccgtggccgaccgcatcggtgtgatgaacaaaggcaagatcgagcagatcgccgccccgcagaacctgtaccagcgccccgccaccgagtacgtggccacgttcattggactcaccaaccgcctgcccggcgcatccaatggcgacgaggccgtggtcttcggccagcgcgtgccgctgctcgccggctccgccaagggcgattccgtggccgtgctcgtgcgcccggagaacctgacgctggccttggccggcagcagcgattcgcacgtcggcgaacgcgcccgcgtggaagtcgttcacttccttggctccttggtgcgcgtggatacggtcatcacctccggcgaataccagcgctggaacaagggtgaacagctcaaggccaccgtgcagctgcccgccagcgagctgccggccggtctggcggtgggcgatgacgtgattgtcgccccgcgtccggtcgccgcgctcgcctgctgaatggcgttgcgatgattgtgcggttctgttctgtttttgtgactgtacgatcgtcgaatggcttatcggcaatgatgtgtgtgggacggcggcgatttttgggcgattatcgcgcgccgtcccacgccggtgcgggatggcatgaacgtcaaacgatgtacattcgtgctgtcccacagaatgtattggggaatcgttgcaatgacgccatttcttcgtgcggcgtcatcagtcatatgtggagtggtgtgggccgccgcgaaaaaatcgggtaaaatcgcgtggcgtcccacagtaatcttgcagagtaggggactttctcgtcattgggaatgattgacgttgatcattccttgcccattgatgatttcctcccccattcccaatgcaatcgaaacgccgtgccgtattcttgaagagtattgcacgtgtgatcggtccgtttgcggccagtaactatgggggataagtatgagcaaaccaatgccgccggcgcagcagccgcaggtacctgagcaaccacagcagccgcaacaaaccccacgcgattggtggttcacggcccatcgccggttttcgacgatcggctcggcgctcgccattatgatggtgttctggatcggactgaatactctggccactgaagcactacgaacgctgcttggcgccgatgtgcctgcttgggctgtgttgctcgcctcctccgggccgctgtatgtggtggccatgccgctgagtatgttggctttcactcgcgtaccggttattcgcacccggcagtaccccatgaaggcgggagagttcattcagattttcgtcatgtgcattccggtaatgttcttgggcaatatgattggcaatatattgtctgccggagccactgatggtcaggccgccaatcgcatcaacgacgtgattcttggcagcgactggcggatgaacgcattgttcataggcctgttggcaccggtttgcgaagaatggatttttcgcaaggagattatctcccgcctgcgccggtacggagagaagaccgcaatcatattctccgcattggcattcgcgctattccatatgaacgtgttccagttcttctacgcctttggcctaggactgatgttcggatatgtatacacgcgcacctcccgactgcggtattcggtggctatgcacatgctgatcaacctgaacgggtcagtactcgccccattggtgatacaacagatcgatccccgcatcctcgacggcacggtcagcgaggccgaaatcatgcgtatggctgaagccggcaacatgggcgacatgggcatcatgatgttgtacggcacagtgatgttgggcctctgcattgccggtatcgtgctgcttatcaccaagcgcaagagctgggagttctatcttgcgccagaggagttgcctgcggggcttaaaatacgcaccgcctatgccaatcccggcgttatcgcgtacctactgttgactgtgatgcttaccggttggatgctgttcgcatgactgtcatagccggacccagagaggcgagccgggagatatcacagattgcctgacgagccgccatcttcaacaaggtattcggtgcccgaaccggcgatggctcgcgccgccatatctttgatggtggaaggcagcacaccctcgcgcgcgaacacaagcacttggccggtcatgccgtaaggggagaagccggtgaacttgaccaatggcggctgaccctccagcgccacgtcggcggtggctttggttacgcggtcgagaatatcctgactgatcgcagacgggtcgccggaggccttggccgtgaactcaagcgtggccatgccttcgctgaccggcgtgagcttggtcagggcggccgtattgagtaccgaattggggatgaccatcatgtctccggaacgggtgcgcaccacggtctgacgccaggtgatgtcgtgcacggtgcctgtgacgccttgaatggtcaccagatcgccgggttggattacgcggcccagcatcaggccgaagccgccgatgatgttggcgattgtatccttcagacccagcgagatcgccacacctccaacaccaagggcggtgataagtgtggtcggattgatgccgaatacgggctgcagtaccatcgctgcgccggtgacccagatggtcacgcgcgtgaggttcacgaaaatcgaggcgctgggaatctgagaattgtccagaatcttgcgcaacacgcggctgatgacgcggtcggccacaaatacgatggccaatacaatggtcagccagatgagtttgccggcgttcacctgaaaccagcgtgcgatgtcttctgcatattcagtcatacgcctactgtatcggtcgtttctggtgaagtcgtggagacggggtggcagaaagcggaatcggcctacggtcgattccgctactcctggcgttcgcggcaggtctggccgaggccgcgggccagtcgaatcggatcgagaatctcgtccaactgctcggcgggcaggtcggtgcgttcgccggccacctcgcgcacggtacggccggtatgtacggcttcggcggcgatgtcggccgcgtgctcgtagccgatgtagtggttgagcgcggcggaaatcgacggtgaggactgggcgtatgaacgccccaggtcagcattgatttcgatgccttccacgcagttgacgcggaacgtctccatggcgtgcgtcagcaacgccatgccggtcagcagctcatgcaccatcaccgggtcgaaggcgttcagctgcaactgtccctcggccacagcccagttcacagtcacgtccatgccgaaaatcgtgaagcagcactggttgacgcattcggggatcacagggttcactttggccggcatgatcgacgatccggcctggcgagccggcacgttgagatcgttgaaaccgcagcgcggcccggaattgagcagtcgcaaatcgtcggcggccttcttcaggtgcacggcgaggctcttgatggcagccgacgtggccacgtacgcgcccatatccgtcatggcggccaccggatcgggcgcggcggtgaccggcagcccggtgatttgcgccagatgcttgatagcggacttgcggaatcgcagatccgcgcaaatgccggtaccgatggcggtggcaccgaggttgagctgggccagcagcggcaccacgcgatcgaatgcagccaaatcagacttcaacagcgtggcaaacgcatgaaattcctgaccataggtcattggtacggcgtcctgcagctgcgtgcggccaatcgtcacgtcattgatatgtttgtcggccagatcgtggaaggccttggcgagtttcttggtggactcggcgagcggcccgatcgcgtcgataagcgcgagtttgcaggcggccgggtaggtgtcgttcgtggactgcgacttgttgacgtcgtcgttcggatggatgtatgtgtaatcgccgcgctggcggccggcgatttccaacgcacggttggcgatcacctcgttcatgttcatgttcgacgaggtgccggcaccgccctgcatcacatcgaccgggaactgatcggccagtttgccggcctcaatttctaggcaggcggcgcgaatggcctcggccttggctgggtcgatcaggcctaattcctcattggcgatggcgcaggcgcgcttgaccgtggcataggcgcgaatcagctcgggatgttggctatcggtgatgccggagaccgggaagttgccgatagcgcgctgggtgtgaataccccagtagacgttcgccggcacctccatctggccgatgcagtcatgttccagacgggtcttgttcgatgtttcgctcatgcttccatcttcctgtgcgtgggttggaaacgccagcatgagaggctgattgcgccttgtgagaaacctcacgcgaggttcgtgcggcggaaacaatccagactcgctggttttcggtcaagcggtgtacccggggaatcctgcggggccgttcgacgatgagatggtggatggcgcggcatgcgtggcggcgaccggcatgccgggggcggtcgaatcctgcgcattgtgcacgaagatgcgattccagtaattaagcatgtccttttggctcatggccaggtatatgcccatggccagcacggccacatcttctttaagcaggtctttgatttcgatggtgtcgctcaattcgggccaacgttgcagcacggcgagcatgccgcccacggtgaactcgaccatgagatcggttttcaggtcaaggttcttggggtcgcgttgcaatgtgctgagcatttgcagacggcagaagtcgcgcagcgattcggtcagttcaagcgtgctgtgcgggcctgccaacagggccaggtggtcgaggcgctgacgctgctctggatcggagagcgtggcggtgacgcggtctcgccattgttcctcgggattgccgttcggatcgggggtgcggttgatcggaatcgattcgacctgatgcaggatggctgaatcggccaattcgggcaggctggagaagtgatagtagaacgaattacggttcacgccagcctcacgcaccacgtcggtaacggtgatcttgcgatagtcgcggtcggcgagcaattcccagaaagcgttctcgaggcgttctttggcgggcagcacctcggaatcatggcgtggacgtggcatctcttcctcctgatgcaccagcgtgatatggtcacgctgtctaataacttattgggcagtataactattatttgtggacatgtctatgagctaatcggcgatttcagttgcgtcctccgctgatggcgaagctgtggtgccggcatcggcatcagtatcggctctggccggagctgcgctatctgctcctgctgcagtttctgctgggatctcggctgttgctttggaggtcgcagaacttggtgcggaagccggggcgggcgtcggcttgcgtttggccgtggacgccttgaacagtatcgccagggcctcaaccaaatgacgccggtctgcgggggtcagcccaacgtacgcgccaagcatcgccggaatcgaagcggggaagttgctcatcacctcgctgaagctggtggcgccgttggcgtgcagcacggtgaacagcgcatccaccgcacgctcgcgctgttcgggcgtaagcgtggcgatccaatggttcagctcctcgttaaacaactgcgagctggaactcaaatccggctcggtgatgaactggtcaccatccaatagccaggtgaaggcggaatgctgcatgatgccatccgaatcggaagagaccacgcggcaaggctccggggtctcgaaaatcatgcccacaatcgacgaactcggcacgattttcgtcaccttcggctggatggtgcggtaggcggggctggtcacaatctccggcgggaaaccggggccatccagtgaatagacatgctgaatgcgcttgcgcaccttgggatcggcgttcatggccgcgtaaatcgccagattgcctcccttggaatggccgaccagaataatcggaccctcccacagtcgcgccaccatatccagataggcgctggctgaacgttgcgccggcaccggatactggaaagccatattgaaatcttccttccatccgatgagtgaatcatcggtgccgcggaaggaaataaccaacgtgcctttgtaggtcggctttcggcgcttgtggccgtcgggcagttggaaggtggcggcggcgaattgggtttgctcaccctgattgatgtgctcgaccaccgcgcctaggcgaacgttggcgtagcgggggttttcgcctgcggcctggaacaggtcgtgggtcaggtccgggttgaccactgaaaccatttgggcttcgtgcggcttgtcgtcggcatgtgtttccggcgaacgatgcagctcgcggttggcctcgtcaaggcttaccgattcaagctcgggatgccagatacccttcagccagatcagtggatgcttgggttcgaaagcgcgaatgcgtgcggcgaacgagcctgaccgcgtctcatccagcatcaacgtcggacagacactggccacatcctcatagatgagcgtggagatgatcaaggcgtcgatttcgttgaacggcaagtcggcgaaggagcgcgtttcggtgtgcgcgtaatcgataatgccggtcatgcgcacctcctgcttccgttgatattgcatatccccttgggctgcgtggtcttgcgatcgcgtgcggccgtgcggctgcgcgcagcaattaaccatatgcattccattgtagggattgtacggttttggccggcgcgatcgagcaagactgcaccgacggcgaacaattcgtggaaggattcccgtcggcttgtcgaaaattgtcgggtagcagggttgcgatgccagccagccgaccaccctccggcgctacgcgccatctcccgccggcgggagggttaaccactcaatcctttttgacgaggcggaccgctgggcccgtcaaaggttcggcagatcgaagcgcgccagatccacgccctcgagttcaagcaactcggccttgatgtcgagtcggccgccgtagccgccaaacgcgcggcccgagccgactacgcggtggcagggcacgatgatggtaaccggattgcgcttcactgcgcctccgaccgcctgcgcggccatgcggccgccgccgcgtcgttcggccaattcggcggcgagttcgccgtaacttaccgtcatgccataggggatttcggccaccagattccacacttcatgttggaatggcgtgccggcgggatgcaacggcggcgtctgatctaggccggggcgctcgccggcgaaataggcggtcagccatacgcgggtcatacggaacacatcgggttcacgatcggattcgcgattcgaatcgagaacggcttggtgatcggtggcccaccaccagtcttcaagacagagctcggtcaggccctcgccgtccgaggccatcatcatccggccgatgggcgtttcgactgtggcccgcatcagttgtcgttgcgtcataccgccattatcgcgcgttgagggatgaagcccatactgtgcctgatttcatgaaggacggcacgtcggcgtagttcgggaacttcacttcggcgctcgataatcgttggaaaaccggtgggacacgcgggggcttggctttttcctgagattggcgtatctttgtcacctgttgcctgtgaaggtaacacatgcggacatagcttagttggtaaagcgcaaccttgccaaggttgagaccgcgggttcgagtcccgttgtccgctctcggatggttgattcatattgattgattcgaccggaggatgacccgggcggttggcgcagtggtagcgcacttccctgacacggaaggggtcacaagttcgaatcttgtatcgcccactcgatgaatcgccggcagaatgttgccggttttttcatcacaagctcgggcgattggcgcagcggctagcgcacttcgttcacaccgaaggggtcgtaggttcgattcctacatcgcccacccgatatcacgctcgtcagtctatgctggcgggcattttctatatctgccgtgccacggttccttatatggcgtccggcctcgggtggcatttggctgtgagcggtttccgattatgagtggcgtccggccgtcgtacaatcccgctgcgcgcggtgccgtttgggctgtaatacgggtgctttgaaccggccataacttcttcatatgtcccggggcttgtgtcgtgtgccgcggcgcgcttccatagtggatatggcggtgcggaaggggagccgccatacttacttacacaaggacgtcttggtccgccagggcaacgcgcatggaaaggggtttgcgatggtgtgcaccacgctgaatttcgcggagaaatacctgctgaaaaccgaagtcaggtccgttgccggtatgtccggcggtacttccgatactggtactgatttcgatgtcgatttcggtggcgagggcgacctcggaagcgatcatgccaccggtctcaatcgctcgctatcggccgacgattattgggctgcagccggatatgccgatgagtcattgtattgatggacgtgatgacgcgataagggcgcgtcgataagtgcggctggtgtcgcggctgatgccgcatctggtgctcgttcggtggtcgcggctgatgttccgtacggaccgcctgcaatggttttgcatcggtggtgcgtcaaaatccggaccgtcgccgacgctgttgacgtctggcggcgttggagggacagataatggattgtcaacgccgctgagaacgattggcgacggtggtgggacagcggatgccccaccaccgtcgccaagagtggtacgtgtgtcggtggcatccaagacatggcccggcaccgacatcagatactctgaacgtcggcggattcccgttctgtgtcccagcgccgacgtttgattcctgcttatgcgagctggcgtcggtaaaaaggcagaacttggttcaccggcgatgtctcagcacgtttgcgcgcgtcggatccttctggagcagcaggaaaacgagcgccgcgacgagcaggacggcgatggacagcacgccgaacgaggcgttgccggtcagggacgtggtggtggctaccaggaaggtgccgatgattgaggcggtcttagggaagaaacaatagtgagaccggggaacccttgaaatcattggggaatcatggtggcgatgcatgcgattaacacatgttgttaacacagatgtggaatgaggaggcgcgtgaggctcgtggtctgcgacgcatgagtgtgaccgtgagctccccagctgatgagcgcaaaggcagagattggtttcacgcgggacttgtctgccgaagagcggcgattgatgcagggtctgtgcgatgctctgcagcagttgctgaacaagcagtaccagcggcacatgtgggactgttcgatagcctgaaaaattttgccgcagacaatctaggcaatgtgcttggcggggatttcaatctcggttcgattggtgatttgccggcggtaatcggtgagcatttcaatgccgatcagttgggtgaaatcaacaggtcgttggcgaccatttgaacgccgactgacttgacgagctgcaggcgctggcggaggaaaacatctccgccgaccagatcagtcaggtcgctggcgcaattcaggagcagggtgccaatctggacctcggatccattgccgaacaagcaggactgcccgctgacatcatcagccagatttccggactattgggcaagtagtcgccttaagctttaacgctgacggtgttgtctcggctattgcgtgttttgcggtcgctcagcaaatcatatgggtcgtaggtaaccgattgcgagcgctgctgtacacagatgtgtacgtgggtcgaagcggattcgtggtggcaggtgagacaagctgccctcgcatggctggaaaagcttcggtctcgtggagtgcgatgttaaagctgctcaggtcaacggaatggcgggattccgccgatgcaacttgtggttgcgctcgaataaccggcgattgcaacccaaagatggtggcgggtgacatggacggcatgccatagtgagcccatcggccgaacatgacatgataaagattacgtatgaagggacattccaatgagttttcgcgctaacctgcagtacctacgtgcgcaacgcaacctgacccaggaacgattggccatgttgcttggcgtctcgcgtcaggccatttcgaaatgggaatccgaaaaggcctatcccgagatggacaagctgcttatgatctgcgacctgttcggctgcacgcttgatgatctggtacttggcgatgtgagtcggcctgccgcgtcggcttctgcggccggttcgtcgaatgttgactcctcggctgaggcggcatcgcctttagccgcttcttccaaaacggcgggcataatcgctcctatcgcggagcttgcgcaggatatcactggctacgatgaacatcgccgccgattcgcgctgctgattgccggcggtgtcgcggcgattgtcgccggggttggcatcggcaacctgttcgattccagcaattccattctcggagcgacgccgctcaacgattttctgacgtttctgtgcatctgcgtgggtgtgattgcggggctggcgatgctgattccaggaggtctgtcgcgtactgacttcaaacggcgtcacccatacgtagaagatttctacaccggggaggaccgcagccgagaattgcggctgctggtaatcggcatcgtcggtggcctcgcggccattctgatcggcattgcggtgacggtgtatgccgatgacatgctcggcgtctccgatgggtggcccaacgcgatttttctgctgctctgtgcgcccggtgttttcgggtttgtctactgcggcatgagatacagtctgctcaatatcaacgcatacaacaaagcggccgaggacgaccgcaaggagcatgcgggtgagcaggatgtctacgtcaaactgaccggtgcggtgtgtggcatcatcatgttgatagccacggtgatcggcctgtgcctgctgtttttgaaccctgcggcattgcgcggcgattggtcggccgttgggtcaagcgccgcggatggggcgatgttctggctgccgtggccgattggcggtgtgctgtgcggcgttgcggccctcgccattcagctggtcaaggattatcgcgagcgcaagtgatcaagcggtgatggtccatcgttattagggcccgttgcaggggttgcgagatatcgcccgcggcgcagagttgccgaggactggcaaatctttgccacaatgtcaagtgatgaattcaaaaaataaaaaaatcgcccgaacggtcaaaaaccattcgagcgaaatacgcaaagtcatcgaaattgggtagcattgagttatctgaaagattgctttgttttgtttgcaattttcaccagcgtcagcataactggcacctccgtcagtacgccgaccgttgttgcaagtgccgccgggctggtagtaccgaacagagcgacagcaaccgcaactgataactcaaagaaattagacgcaccaatcatacccgcaggggcggaaatatcgtgcggtaactttaacaacttgcaggctccataggcaataaagaaaatcaaaaatgtctgtaaaatcaacggcactgcgatcagtatgatgtgcagcgggttttctaaaatgacttcgctttgccccatgaaaatcagcaccagcgtaagcagcagaccaatcgtagtaatggaatcaaatttgtgaataaacacattttcaaaatactctgttcccttactgcgggttacaaatacacgggtcaaaataccgcctgccagtggaataaccacaaacagtattacacttaaaatcagcgtatcaaagggaacactaacattggaaacgcccaacaaaaattttacgataggcacaaaagcaatcagaatgatgaggtcattggtcgccacctgcaccaccgtataagctggatttccttttgtcaacgtactccatacaaacaccatcgccgtacaaggcgcagcccccaaaagcactgctccggcgaggtattctaccgcaaggtcaggcgtaataaatgccttgaaaatcacgaagaaaaacaagctggcaatgccatacattgtaaaaggttttataagccagttgacaatccatgtcacaaacaaccccttcggattttttcttacatttcgtacactgttgaagtccactttcagcatcatgggatatatcattacccaaatcagaatagccatcgggatagagacacgggcatattccagccgagccagtaatgcagggactactggggcaaaatgccccagcaatacgcctaccaccatacacaggaatacccatattgtcagataccgttgaaaaaaattgatccccggatcagcttcttttttcaaccataaacacctccttcaattcgtatttttaaccgtataatgtgcccctcaatttgactgattatttcccggaacgcttcatccgggcagcctgtcgggtcatttagtccccagttatcgtcaaaagctctgccaatatagggacaacccacatcacagcccatcgaaatcgcaatatccggttccgggatgctgtcaaaggttttactgtattgggactgttccatatcaatcccatacagctctttcatcaagcggacagcatcctgattgatctggggcttggtttcgcttccagcagaatagctttcaaacacatcggaagcaaaatgcttccctaatgcctctgctatctggctccggcaggaattgtggacgcatataaaagcaactctctttttctccacttttagtaccccaacttatggatcagtttttccacatcagcagctttcagcacctttcccatagacaccactttttcattgaccaccaacgcaggcatagacattacaccgtaggccataattttctccatatcagtgatatactccggttgaatagacaaccccatattgttcagtgctgcttttgtgttctccagcaaggcatggcaattcttacatccgctgcctaaaaccttaatacagcaaatactgttgcttgcctcatcgcagcagctaccgtttacagtctcggcctcatacgtttcacaagctccattgcaagcacaagcaacagtctttcctccttcctcttttcttttgccaaatccgaacagtcccataatagaatctcctttcaaattttgtatggttacaccttatccttgttaaatcaacagatgctgaaatacgttaaacagataacccacaatgacaattccaagcgtgcagattacgatgaacagtcctaacagttttgcttttaccgcttttttcagcataataatggacggcaggctaagcgtagtgacggccatcataaagctgaggattgtaccaagctgcgctccttttgcaagcagggcttccgcaacggaaatcgtgccgaaaatatccgcatacattggaacacccaccaacacggctaacacaacaccaaatggattgttgcttcccaataccgtctgaatccagctttccggaatccagttatgaatgattgcgccgataccaacgccaaccaaaatatacgggaacactttcttgaaagtctcaattacctgttcctttgcgaagatcagccgatccctcactgtcagtgcatctgattcaacatccacgctgtttgcattacggatgaaatcttccacgtagttctccatgtgcattttttcaatgactgtaccgccgattactgcaatcaccaagccaactaccacatagacgattgcaatctttgccccgaaaatgctcatcaacaataccaaacttcccagatcaaccatcggagatgaaatcaggaaagaaaaagttacgcctaaaggaagtccagcgctggtaaaaccaataaacagcggaatagaggagcaggaacagaacggcgttaccgttcccagcagagcagcgatgatatttgcccagataccatgaaaacgtcccagtatccgtttgctccgctcaggcgggaaatagctctgaatatatgagattacaaaaatcaagacacaaagcagcacggtaattttaaccacattgtaaagaaaaaactggatgctcccacccaagcgggatgttgtgtctaacccaaaaacggataaaccatttccaattaccgtgttcagccacttcattccaagcacctgatcttgaatgaaaagcctcgttaatcgtaaaatctccataaggtatgtctcctttcaaattgataaattcaaaactatcgaaatgttgtccaaaagagaagccaccctttacagatggcttattttacctacagcaacttccgttttgctcatcatgaggaactaaagataattgttgctcaagcaattttttagcacgctctgcgccttcgggattgatggagtaatgaacccatttcccatctttacgcccttgtacgatgtcggcatcacacaatattttcatgtgatgggaaagtgttgattgtgtaatatgcaaatcatcaagcaatttgcaggcgcatttttcccctgtgcggagcaattctaaaatctgtaaacggttttcgtcacaaaatgctttgaacacctttatggtctctgtgtatgcagatgccacgaatctcacctcacattcgctgttttgaacttacatcctcattatattcataaattcaaaaatgtcaatatgaattttgcgaaaaacggaaagatgaacaagctgtttttcaagccagcgtattgacacacaaaaaataacccctccctgtcaagggaagggctatcacagtactttattctgttatttccgggatttcactcccgcgtcgggtccttttgcaggagcaggaaggccagcgccacgacgagcaggacggcgatggagagcacgccgagcgaggcgttgccggtcagggacgtggtggtggccaccaggaaggtgccgatgatcgaggcggtcttgccgaagatatcgtagaagccgtagtactcgttggcgtgatctttgggaatgatcttgccgtagtacgagcgggagagcgcctggatgccgccttggaacatgccgaccagaatcgccagaatccagaactccacggccgatttcatgaagaacgcggcgaagagcacgatgcacatgtatgctacgaccgccgccgtgatcatcactttgcagccgaaccggccggccagacggccgtagagaatcgcgcaggggaaggccacgaactgcgtgacgagcagtgccaccaccagctgggtggagtcgatgccaagctcggcaccgtaggaggtactcatcgaaatcaccgtgttcacggcatcgatgtagaagaagaacgcgatcatgaacatccacaacggcttgttcttcacgattttgccgaacgtgcccgccagttcgctgaacgtgccgcgcacggccgagcccagctggtcacgggtggcgcgatagtgcacttggcggtagctggtaagcagcgggatggtgaatgccacccaccagatggcggtgatgatgaacgaggcgcgcgtgcaagccaccgtggaccagtcgaagagcgacgggccgccgaaaatcagcgcgatgcagaagatgaacggcacggtggagccgatgtagccccagccgtagccatgcgaggagaccttgtccatgcgctcgttcgaggtggcgtcgatgagcatcgaatcgtagaacgttagcgagccgttgaggccgatggtcgccagaatgtagacgactaggaacggtagccaggtcaggggcagggccattgcgcagcaggtgaccacgccagtgccgaagaagccaaggaagaacttgattttcatgccttgcacgtcggcgatggagccgagcaacggcatgagcagcgcgatgaccaaggaagcaatggtttgcgcgtagccccaggcggacacgatgttgccgtccgccggcatcagcgatttggcgtaaatggggatgacggcggtggacagcagcacgaatgccgagttgccgacgtcgtagatgatccacttcttctcgcgggcggtcagtttggcgctttgcggcaccggttcgtggacattcgtgggatcagtcatatgcactcctcgacagtattcaactcaatctatcgtagaagcgcggactagggtagaaaaccgccaaagttgaacggcgggtgaatagtgccggggcccctttctaaggggagccagggcaaaaaatagctcccctcgctgaggggagctggccgcgaagcggactgaagggagccgggactgaagggagccgatcgtggattcccccagatgaggaaatccactcaatcgtccggaaactattcgccgatcagcgcgatggcctcgtcgtaatcggggcattgcggcacgccgttgaggctgtgctggatggcgatggatgccgccgcgttggcgatctttaccgattcggccagactatggccctttgccagcatcgcgcacatcacgccggtgtggcaaccgcccgccgaacgggtgtgtacggccttggtcgggtatccctcgatatgaatcgtctcgccacctggctcacgaatccaagcgccgcgggcgccgacacgcaccaccagcggcgcgcgcagtgtagcgcccaagccgtcgcacaactggtgcatgaagtcgtcaagtccgccgccaatggtgactttgctgtcgtcgattggcgcaccaagtcgctcggccagcgtcatggcctcctgacggttgcaggaccagaccgggcgtgcgagcaccaggtcctcaagcatatggtcgttgaccaaacgcaacgtattggtggggttgatcaccagcgtgtagtcgcgtgcagccgggtcggtaccggccttgagcaggaatccgtccacgccggtggccgtgtggtccatcagtgtgttgccgctgatgtgcaccacgtctttgggctgcggctccagcgtgtcgaacgtgtccgagtcgccatgagcctcggcgccataggaagcgatgaatgtcttcttcggcgcgccggagctcagcaccacgcggaagccggaatcctcatcaagacgatcctggccgatatgcgtaatgccgttgtcttggaatgactggcggatgaaatgcgcccacaggccgttgcccagaatgccggcgtgctcggtcggcacgcccatgcggctggccgcctgcagcacgcgatagctgccgccaatggagggcttcggatgatcggccacggcgaatccgccctgtgccggcaccttgtccacattgagcataatgtccacccagacttgccccagtgaaatcacgctgggctcgtgagtgccgatacctcgcttgagattcaacatgacagcctccttcgtcgtaagttgcacgaggaccccttcgtcccttgccgtctcttataccgagattatatgagagtttgctggatgcggaaaaggaaggccggcgtgttttatcgggtaaacgctatgatttgcagcgtaattcgccgctggcgaactgctgacgaactacttgcggaccgctggcgaaccaatgccgagccgctcgtgaaccgctgatggcccactcgcaagttacgctcgaaccgcgcgtgaaccgccgaggttcgcccatgatacacgcaagagttgcggttgtcggtattgggctatatatttgtgaagttgtgtgttcggcatgtcgggtgaaaccggcggtcgaatgcgtgaaagacttgacacatcaaggttaagggagtccatcatggcagctcgttgcgcagtgtgcggcaagggaccgcagaccggtttcaccgtttcccattcgcaccgtcgtaccaagcgtagcttccgcccgaacctgcagtctgtacgcaccacgattgatggcgagaacactcgtctgcgcgtgtgcgtcaagtgcctcaaggccggcaaggttcagcgcgtggccgcgtgaatcgcgtactaacgtggagcaaaacccgtttgagcttcggctcagcgggttttgttgtttctgcggcctaaagaggccgtgcgaatagaataggccaatatgagcatcactatggacaccactctcgcttcgctggtcaccaacaagcgtcgcgtgtccgcgctcaaatcgctgggaatcgtcactgtcggcgacgccctgacctactatcccttccgcgtcaccgaaccggtgccgcttcgcgccatccgcgaggccgcacccggccagcagatggcatttgccgccgtgatacgagacatgcgcgtggtgccgatgaacgctcgccgcggctaccgactcgaggcgacggttgacgacgccgacttcgcccgttcgcgtcgcgtacccggcagcacggctcggctcacgttcttttcgtatcgtaaatcgtatgtggattgggtcagcatgcggctgcgcgccggcacgtctgtggtggtctccggtatgcccagcgaatacatggggcagctgcaattcacgcaccccgaaatcctcactgtcgcgcccgggtcggccggagcaggagcggggcttgagggttacgctcggggtgcggcatccggcaatggtgcgtttgcgggaagtaccgatccgtatgccagtgtgcagtccgcgtatccgccggccgcggctgcctcttccgggaccgcgctgaaatacgacgccgataccgtgcaagaggcgcttacccgcgtctgccggccccgtccggtatatcacgccagttcgcgtatctcgtccgaacatattcatgagacgattctgggattgctgtggatgatgggggcccgcacgtcatccacgcctgacgggcaactcgctggcgctgggtcagccggcattgtggctcccacgaccgacaccatcgccgtccaaaacggggaagagaattccggcacgaccgccgaatccggtgctgaggcgctctcccaatccatcccagatgtgctgcccgaatcggtgcgcaaggccaagaacctcatgcatcgggctgaggcgttcctggccattcatgatccggattccacgacccggttcaaggaggccatcgaaaccctgcgctatgaggaggctttcgtttcgcagacctcgctgcttaaagccaggtcgcacgcccataaatccgcggctcactcttgcccgttggtaaccgacagtctgcgcgatcagttcatcgcatccctgccgttctccctcactgcagggcagcagcaggttattcatgatattgccgccgatttagctcatgactggccaatgcagcgtctgctgcaaggcgaggtgggctccggcaaaaccgtagtggcgctcgctgccatgctccaagccgtagacgccggctatcaggccgtgcttgttgccccgactcaggtgctggccgagcagcatgccgaaaccattggccggatggtggagcaactcaagccagcgattccagtcacgttgttgacgggcggcatgaagcttgctgcgcgacgtaaagcacttgctgcggcgtccagtggcgagccgggcattatcgtggccacgcacgcggcgttttccaagaccttccaagccccgcacttggccttggtggtaatcgacgagcagcaccggttcggtgtggaacagcgcgaaagtctcaacgccaaaaccgatgacggcaccacgccgcatctattggtgatgaccgccacgcccatcccgcgcaccgccgccatgacttggtttggcgatctcgatatttcctggctcaccgaattgcctggcggccgcaaaccgattcgcaccgtggtggtcaatgaggccgacgccgccaccatgggccgtatgttcgcgcacattcgcgcgcgagtcgacgcgggggagcgggcctatatcgtgtgcccgcgcattgatgcggatgatgaggggaacgaaggcggttccggcgtttcggcagcagccggttctgcccgcggacgcgccgcagcatctggttccagtgcccgcacagctgcgggcggccgtgcaacgcgcgcggcggccgacgccatcggcatcgacgacccctacgaaaccttcgacgaaaacggcgaaaccgtggctcgcccgccattgcatgcggtggccgaaatcgccgaccggttgcagaaactcccgcaattccaaggcattcggtttgcgactctgaccggccgcgacaaggatgacgtcaaaacccaggtcatggccgattttgccggcggcgagactccgatcctggtgtccaccacggtgatcgaagtcggtgtggatgtgaaacaggccagctgcatcgtgatctttgatgccgaccgatacggcctctctcagttgcatcagctgcgcggccgcgtggggcgtggcggcaccaactcgtgggcgttccttatttcccgtgcggaacccggctccccggccgagcaacggctcgaagtgattcaccactcgctcgacggtgccgaaatcgcccaagccgacttggaattccgcggtgccggcgatgtgctcggcgacgcccaatccggcggcaagtctagcttgaagctcctgcgcgtggtcaaggacgccgacatgatcgccgacgcccgcacccgtgccgagcagcttctggctgccgaccccgaactggcagacgaggtccaactcgccggtgccgtcctcgacttcacccgaggcaacgaaaccttcctgacctccagctgaggctagggctgcgcccccccccgtaatcgcacgatattgggcgggttctagtgatcgttgcaacacctgacctaccgcaaggagggtcaggtgaccagaagccaccgaaacgaagaccgtggcggggaacaccgttggacgttcaacggcgtcgaatatccgacgaggaagctgatgtgcgaggcgagacgcgccgagtacgtgcgcctgctggacgaggaaggcatgaacttcacccaggccgcgcacgcggtcggcgtctcgaaacgcaccggcaaggcgtggcgcaacggcaggacgcgcgccacgggaaggaacgagaaacccctggtggactggtatcgttccaccatggacaaacccaagaccctccatccgcgctacctgagccaggaggagcgcatccagatcgcggaccgtctgcgtctgggcgattcgatccgcgccatcgcccgcctgctgggccgcgaccccggcacggtcagccgcgaggtcgagcgcaacaggaatcccgagtccggcggttacgagccttaccgcgcccagcagaaggccgcggaccggctcaaacgccccaaaccgcgcaaggcggccgagggcacgcgactgtgggacgagatcgccgccgggttgcgcaggcattggagcccggagcagatagccaaccggctgaggctggacttcccggataatggggatatgcacgcgagcgtcgagacgatctaccaggccatctacctgcaggccaggggcgaactcaagcaggagctgaaacgcgccatgaggcaggggcgaaccgcccgcagaccccaaggcggccaaggccgcaaaccccgtttccgcgaacccatggccatgatctcggagcgacccccggagatcgaggaccgggcggtcccgggccactgggagggcgatctcatcaccggcagccgcaacaaaagcgccatcggcacgctcgtcgagcgcaccaccaggttcacgatcctgctgcacctgcccgacgggcacgacgccgaacacgtccagcaggccatcatcgacaagatgcagcacctgcccaaactcctgcgcaacagcctgacctgggaccagggagcggaactcgccctgcacaaacggatcggcgcctcgctggacatggccgtctacttctgcgacccgcactccccgtggcagcgcggcaccaacgagaacaccaacgggctcctgcgccagtacttccccaaaggcaccgacctatccgtctacccggaggactacctcgacgcggtcgccgaggaactcaacgaccggccacgcaaaaccctcgggttcatgaaaccaagcgagaagatcatcgaactgctcgacgccgcgtgataacctcaacaaccgacaacgtgaccatggaaggccgctcaaacctcaggtgttgcaaccaccactagaatctgccttgtattttcatctggtaaacagaagtaaatgcttgtgccagagacggattgcatatgcatgggtgcttcgtggaagctgattctgtgttccgttgctgagttacggacgtgctggcgatacgcagctttcgcgttcgacaagctgcgtgggaaaaatgaagtaattctgttccacctttccttcccgcgcttcgagaatcaggtcgatgcattgtctggcgatgaggtcgaatggctgcctgatggtcgtcagggatggacacatgcttgccgcaggatagacatcgtcgaaaccgatgatcgataattgttcgggcagactgatgccgtgctgtcgggcggcgcgatagacgttgatcgcgccgagatcgttgaacgcgaagatggcggtcggtcggtcctgctccctcatttccaggagatcgcatgccgccttgtatgccttgtcagatgcgtagtcgccaaccttgatgagatgtggatccgcgctgatgccgtttttctgcagcgccgccatgtatccgctcagtcgcgcctgcgaggactgtgaattagtagggccagtgatgacggcgattcgtcgatgccccaatgatatgagatattgcgtggcgagcattcccccggtccagttatcaatgcccactcccaatgcgtcagcggagacctggccgaccggatcgacaattacatatgggatgttcctcgtctgcagcagcgattcctcggccgatgagatattcgataagagaagtatgacgcctagtgggttgcgttcgatggcgttacggaggcagctgctggcctcgtttcttgttgcgtattctccggaatccggtccggcgcagcttacggtgatgccgaggccaaaatctctggcgtatgaagctgtctccttgaccatttccacggtgccgttgttggtcatttcgctgacgaccagttcgattgaccgcatggtttttgttgtgggaagttttttgcggaatccggcttcttcgaggagcagttccaccctatcgcgggtctcgtcggagactccatcacggccgttgatgaccttggacacggtagcgggggatactcccgccgcttgggcgatgtcggagaccttcggtctgtttgttgttttgattgtggccatgactcttctcttttcgtatgcgacgctgcaaaaaaagcgttatatatagagtagcgaaattttcgctactctaaaacagcttttttatcggcgtgttgctgtctatatagcggaaatgggtgttgtagacgtggattggctgctgtttcttcgatgagtacgatttgtgcatatcgttgcaataaagcccttttaaggcgaaaaaacaagataaagaaaatttcgccacgcgcaacgaagttttatttgcttttttttttaaagccttgtacactgaacgtaccgatgaatgaaacggcaatggcaacgatgttgttggcaggctcattcagacgggttaagaagaaagagaaaaactatgacaaatgcaacggcgaaaccggatacttccgggatgcgcaagccgaagcgcgagtacataggcatgttatattgtcttccatacgtggtggtcttcctattcggcatgatcatcccgatgttctacgcgctttatctcagcttcttcaagcagtcccttcttggcggcaccacattcgcgggcttcgacaacttcatccgagcattcaaggatgaggccttgtggggcggctttaagaacgtgctgatctacgcggcgatccagattccgatgaatctgattctgtccctcgtggcggcgctcatcttggactcccagagaatccgccatatcgcagtgccgcgaatcctgctgttcctgccttatgccgtcccaggcgtcatcgcagcactgatgtggggatacatttatggcgataagtatggtctttttggacaaatcgccggcatgtttggcgtagcggctcctaatatgctgtcgaagcagctcatgctgttcgccatcgcaaacatctgcacttggtgcttccttggctataacatgctgatttattattctgcactgatcggcattccgaacgatctgtacgaatccgctcgtattgacggcgcttcggagctgcgcatcgcttggtccgtgaagattcctcagattaagagcaccatcgtgatgacagtcctcttctctgtaatcggcacgctccagctgttcaacgaaccgaacatcttgcgtacttccgccccggacgtgatcaacagcggctatacgccgaacatctacacctacaacctcgcattcaatggtcagaacgtcaactatgctgctgccgtctctctggtcgtcggcatcatcgtcatggccttggtcgccgtcgttaagatcatcggcaacaagtgggagaacaagtgatgagtgaagcaatcgcaaaacctcgtgccaagtcgctccagcgcagggatgccaagctggcgctcaaggcaagcaagcgttacaagcgcatgcagcagcgtgagccggctccgaagctgaccggcaagcagcgtgtgctcaactggctgctgcacatcattatggctttgatggtcatctattgcctcgtgccgctgttgtgggtcattttctcttccacaaagaccagtgagggcatcttcagctcttttggcctgtggttcgatgacaagaatgtgttctggcagaacgtgcaagacacgttcgcctaccagaatggcgcctatacccgctggctgttcaatacgatcatgtacgcagtggtagcaggtgttggtgcaaccatcattgccacttttgctgggtatgccatcgccaccatgcgattccccggacgtaacgccctactggccgtcactctggcattcatgtcaattccttctacggtaatcaccgtgccgctgttcctcatgtattcgaagatcgggctggtcggcactccatgggccgtgattattccgcagctggctacgccgttcggcttgtatttgatgatcatctatgcgcagacctcgattccggtctcgctgattgaagccgcgaaactggacggtgcaagcacttggaccatcttctggaaggtcggtttcccgctgctgtctccaggtttcgtcactgtactgctgttcacgctggtcggtgtctggaacaactacttcctgccgctgatcatgctctcggacaccaacgactacccgttgacagtcggtctgaacatgtggctgaagatgggtgcccaaggaactgccaacggtcaggttccgaacaacctcatcatcacaggctcgcttatcgcagttgttccgttgatcatcgcattcatgttcctgcaaaagtactggcagtctggcctcgcggccggctctgtcaagcagtgaaccttcggccgcacggtccctacgatcacccattcgttgccttggcgaccgtgcggcatccgcccttttggaaaacaacaaaatagtaattcatgacacacaaaggagtaatcatgaagaagagtatcaggcttgtggccgctatcgcggcgctggcaatgacggccgggatctcggcatgtggttccagcactaatgggaaccaggccaagagcgatgtgaccgcgcaggacgtcgaaaccgctctgaccgacacctcgaagaacgtcgaactgaccgtctgggcctattccgccaagcagatggagcccactgtcaaggcattcgagaagaagtacccgcacatcaaaatcaactttgtcaacaccggtgccgcggaggatcatttcaccaagttccagaacgtcgttcaagcccagaaggatattcccgacgtcgtgcagatgagcgctaataaattccagcagttcgcggtttcgggtgcattgctgaattttgccaacgatagcatcgaaaaggcatggagcaagctatacaccaagactgcatgggctcaggtgcattacgctggcggcctctacggtgcgccgcaggacgccacgccgttggccaactatgtgcgaaaggatattctggacgaacataacctgcaggtgccagaaagctgggaagacatctacaacgagggcattaagctccacaaagaagattccaacaaatatatgggaatcctgggatccgacatctccttcttcactaacctctaccgttccgttggagcgcgtctgtggaaggttaattccgtggacgacgtcgaactgactatgaacagcggaaaagcaaaggaattcacggaattcctgcagaagtgcctgaaggatggcgtccttgaaggcggtaccgtcttcactgacgagttcaaccgttcgattaatgacggtcgttacgccacgttcatcaatgaaaactggatgggcaacacctacaaggagcagaacccgagcctcaaaggcaagatggtggttgctgccccgccgtcctggaaaggacagccttaccagtcctcttccgtcggctccatgatgagcgtctccgcggcttgcccgaaggagaagcaggcggcggctctcgcgttcatcaactggcttgattccgacaaggatgccatccagtcatggcaggataccaacaacggcaacttcttcatggcggcctccgtctatcaggacgatgagaaccagcgcaataagaaggagaccgacggttactacgccaatgatgatgtcaacgccgtctacttcgattcaatggacaaggtcaacaccgattgggagtatctcccgttcatgtcccaggtggaggtcgtgttcaacgatgtcatcgtgccgcagatgaatgagaacggtgatctggtcggcgctatggccaaggctcagcagaagctcaagacctacgcaaaggacaacggcttcaaggtcaccaccgacgctgactgacatacggttgcccgtcaccgctagggagggcggccgaatggccgtcctccctttttgaaattaaccattttccaaagaaggaagcgcatcgtgagcgttattaccaaagtcaccacgtatgatttccgattcccgacatcggccaccttttctggctccgacgccatgaaccccgatccggattattcctccgcctatgttgtcatcgccacggatgctggtgattccggcaacggattcgtcttcaccatcggccgtggcaacgatgtcgtcgtccgggccatcgactccatgtccgagacccttatcggtcgtaacgtcgaggaactgctcgacaacatgcgtctcgcatgggatctgttcgtgcgcgattcgcagctgcgctggctcggccctgagaagggcgtcgagcacatggccatcggcgccgtgctttcggccctgtgggacctcaaggccaagcgcgccggcaagccgctctggctgctcctttccgagatggagcctgaagagctcgtcgcgacgcttgacttccgttacctgaccgatgccctcactccgcaggaagccctcgagattctgcgtgccgcccaggaaggcaaggcggaacgcatcgcccacctcaaggaagttggctacccgggatattcaaccgcagctggatggcttggctattccgacgagaagatggtccgcctggccaagcaggagaccgaggtcatgggcttcaagcagatcaagcttaaggtcggtcaaaacctcgaagacgatctgcgcaggctcaagctcgcccgtgaagcggtcggcccggatatcgccatcgccgtagacgccaaccaggtctgggatgtgccacaggccattgaatggatcggcaaattcaatgactacgatctcgcgtgggttgaggaaccgacctgcccggatgacgtgcttggacatgccgcaatccagaaggccatcgatccgattccggtggccaccggcgaacagatgcagaaccgagtcatgtacaagcagtacctgcaggctggcagcttcaaggtcatgcagattgacgcgacccgagtcgccggcccccaggaaatcgtcctcgaatacctgctcgccaagaagttcggcgtcaaggtctgccctcacgcgggcggtgtcggcctgtgtgaagccatcagccagcttgcgatgttcgattatgtgtccgtctctggcgagatggaggaccgcgtcgtcgaatacgtggacaaccagcatgagtacttcgtacatccgaccgtcatcaagaacggacgatacgtcgcgccgctcgctccgggcaacggcacggagatgaagctcgacgaatgcatgaagtacctgcacaaggactagtcggaaggacctgagatggacctgcatcttaagaacaaggtgattattgtcaccggaggattcaaaggcatcggcaagggcataacgctgcgactggccgaagaaggcgccattccggtggtgctgaatcgttcggatggtgccgacgacgaattccgacaggatatcgaacagatcaccgattcgtatgacacctatctgatcgacctgaacaacaccgacgaaatcgcccccattgttgaatcggtcatgaagaaatacggccatatcgatggtgtggtcaacaacgccggaagaaacgacaacttcgcgctcgagaccacgtcatggcgtcagttcgaggagtctcttcacggtaacctgacccactattacgagctggttcatcagtgcgtgccagcgctcaaggccagcaagggctcggtggtcaatatcggttccaagaccgcattgactggtcagggcaagaccagcgcctacgctgcggcgaaaggtgcgattctgggtttgacccgcgagtgggccgccgcccttgctccagatgaggtccgggtcaatgccgtcgttgtggccgaagcatggacaccgctgtacgcgcaatggatcaagacgttcggcgatgagcaggcacagcgcgagcagctggctaagatcaccggcaggattcctcttgggcaccgcatgaccgagacttcggaaatcgcggacaccgtggttttccttctgtccgacaggtcttcgcacaccaccggacagtgggtcttccctgacggcggatacgtccacctcgacagggcactcgattaggacacgcgacatgcagaggatcatcgattcacatttccatatctgggatccatccgtccaaccgctttcatggctcgacggtacggatgggtccatcacccgccgttatgacatggactgcctcaaacgcgcctatgcctcgtacaatgagcgccatccggacgctgcggtcaatttcatcggcggcgtgtacgtggaagtcgacacggacgatacatcattggaagaccggctgctgtccgaaaaccatgatcctctgctgttggcaacatccatgcggtccacagtcgggccagccatgcgcgtgccactgtacgcgcatggtgttcgtgagccgttgcatacaccggcgtcaccgcggggacggtgcctgcaagatgacttcatccgcggtttgcggcttatggccgataagaacatgccattcgacgcatgcgtaagagtggaggagcttgacgatttagctcaggtttgcgagcaggtgcccgcagcgaccgtcatcgttgaccatatgggcaacatatccaatctccaaaaccttgaatcctcgtccgaagccctgcacaggctcggagaactgccaaacgtgtacgtcaaggtatcggggtatccgaccgacgatctacgattcgtatcaaccctgctcgatctcgcacaagccgcgttctcgaacaagcggttgctgtacgcgtcgaattggcctgtcgttggtctatacgccgatttcgacagtcatctgtcaatcctgctcaatcgtttcgcgggggatgacgacttcttcctcaataacgcgcgaaacgcctaccatatcgtcgaaaggaaaatgtcatgacttgcaacgcccaattcgaaggcgtgttctgcccttccatcaccatcacgaacgcggatgggaccattgactacgataattggggcaagcacctcgatcatctcatcgacgcaggcatcgacggtgtgttgctgttcggcagtatcggagaattctacgccatcgacgtcaagacgaaggcagaagcggtgcgtttcgccgtctcgaaagtcgctggacgcatgaaggtgctcgttggcgtgggagacaccaacttggacaatgtgagaacattggcggcggaaagcgaaacagccggagccgatgcattggttgcagtgtccccgtactatttcggaccatcaccggattgcgcgaagcgctacttctctgcggtggccaaggcgacgacgctgccggtcattctgtacaacttcccagccaggacgggcaacgacctcacgcccgaactggtggcggacctcgcagcggagaaccagaacatcatcggcatcaaagacaccgtcgacaccatcagccacaccaggaaggtcatcgctgccgttcgtaaggtgaatccatcgttcagcgtgctgtccggattcgacgagtactacaccgtcaaccgaatcagcggcggcaatggcgtgctgtgcggattgaccaatgtggagccggagacattcgtcagcctgcatcgtgcatggcagtccggtgactatgccacggccatcaagtcggctgagcgcatttcctatctgatgcgcctgtacgacactgccgacctgttcatcagcgccatcaagggcgcggtcaaggcgaagggactgccaatcgacacgtccatccatgaacccgccgtgcagctgaccgatgaacagtaccgcaatatccagagcattctaggcaagtaacaatcaaataagtctgaagacaagcaggagcagctatgctgaaagggataccgtcgatcatacagcccgatttattgaagattctcagtgaaatgggacatggcgatactatagtcctcgcggacgcccactttcccgctgaatcattggggattcattcccatgtgatcagatatgacggtcagcccatcgaaccacttctcgatgcagtgatgcagcttataccgttggatcaatatacggagcatccggtgtttttgatggataaggttcctggagacgccgtcgacaccccgatatgggatcggtatcgtcaggtaatcaccaagcatgagcctgacagacaaacggctatcggaatgctggaacggttcgccttttatgatgaggccgaaaaagcctactgcatcgttgcaacaggtgagcagtcacagtatgcgaacatcattatcagaaaaggcgttatccgttaattcctgtgtaggagcaaaaatgagcaatccaacaaatgatggtatcaacttgaattacctcgcaaacgtgcgtccctcgtcgcaacagcttgtctggcagcgtatggagatgtatgctttcatacacttcggcatgaacaccatgacagacagagaatggggtcttggacatgaggatccggcgctgttcaatccacagaatgtagatgtggaacagtggatggatgcgctggtggctggtggaatgactggtgtcatcttgacgtgcaagcatcatgatggattctgcctgtggccatcgcgttacacgcagcataccgttgccgcctcgccgtggagggacggaaaaggggatctcgttcgtgaggtcagtgaggccgccagacgtcatggactgaagttcggcgtatacctgtctccgtgggatcgaaccgaagattcctatggcaaaggcaaggcatatgacgatttctacgttggacaattgactgagttgctcacccagtacggaccgattttctctgtatggctggatggtgccaatggtgagggcaagaacggcaagacccagtattacgactgggatcgttactacaacgtcattcgttcgcttcaacccaatgcggtgatatccgtatgcggtcccgacgttcgttgggctggaaatgaagccggacatgtgcgtgacaacgaatggagcgtcgtgccccgacgactgcgctcggcggagctgactatggaaaaatcacagcaggaggacgatgcgtcctttgcctctacggttcgctctcaagatgacgaccttggaagccgcgaggcggtttccggatacggggatgacgtctgttggtatccggctgaggtcgatacctccattcgccctggatggttctaccacaagtatgaagacgacaaggtcatgaacgcagatcagctttttgacctctggctttccgcagtcggcggcaattcgtcgcttctgctcaatattcctccttccccagaaggactgttcgcagaaccggatgtggagtcactcaaggggttgggaagccgtatcaatgaattccgcaaagcattggcttcggcttgttgcgaagtcaagaccagtagcgcgaacgaagctgcaatgcgacttattgatgggaatcaagacacgtattggtctcctagcaccgatgacgtggcccctgctgtcacgctcactttcccacaactgacgacgatcaatgccgttgtggtcgaagaggccatagagtgtgggcagcgcatcgaacatatgcgcgtcactggcgtgctatctgacggcactgagtgtgtactcggacagtccggcacagtgggataccgcaggatactccgtttcgacgatgtcgaagtatcttcggttacccttcatgtggatgattcaaggctcacgccaatgatcagccgtgcggctgcggtgcggatataaggcgggtatatcaccatgaaactcacattcgatggaatctcttcgtgctgggaagaaggcatcccgctcggcaacggacgcatgggagcggtcctgtgttccgaaccggaaaccgacgtgctgtatctcaacgatgacaccctttggtctggatatccacacgcggaaacctcaccagtgacgccggaaattgtggccaaggcacgtcaggcggcatccggcgacgattacaccgctgccacgcgaatcatcaaggaagccacactgcaggagaaggacgaacagatttacgagccgttcggaacggcccgtattcagtactcgacccctgcagacggccgtgagagcatgaaacgccagctggattttgcaagggcgctcgccggtgaaacattccagatgggtgatgccaacgttcatgtcgacgcatggtgcagcgagcccgacgacctgttggtctacagaatgtcatcggatgcgccgattgatgtgaacatcagtgtcgccggcactttcctcaaacaatcacgcgcctcgttggaaacggtatccgaaggccatcgggccaccctcatcgtcatgggccggatgcctggacttaacgtcggacttctgccgcacccttccgaaaatccttgggaagatgagcaggacggaactggaatggcgtacgccggtgcgttttcccttaccgccacaggtggcggcatcaatgtgggggacaacagtctgcaatgttcgaacatcactggattatcgctccgcttccgcagtatgagtggattcaagggaagcgaccagcagccggaacgaagcatgacggttatcgccgaccatctggagaaaaccattgacgagtggtcgactgatctgcagaccatgctcgaccgccacatcgcggactaccgcaaatatttcgacagggtggccatccatctcggttcagcccatgatgacgatacggaactaccgttctcggcgatccttcgctcggatgagaaaaaggaaccgcatcgtctggagatgttggcggaagcgatgttcgatttcggccgatatctgcttatctcctcgtccaggccacacacccaacctgcgaatctgcaggggatttggaaccataaggatttcccgaactggtacagcgcctacacgacgaacatcaacgtcgagatgaactattggatgaccggcccctgcgcgctcaaggagctcatcgagccgctcgtctccatgaatgaggagctgctggcaccggggcacgatgccgctgacaggattctcggctgccgaggatcggctgtcttccataatgtcgatctctggcgtagggctcttccagcaaacggcgatccgatgtggtcgttctggccgttcggccaggcatggatgtgccggaacctgttcgatgaatatctgttcaaccaggatgcatcgtacctgtcccgcatctggccaatcatgcgggacaacgcgcgattctgcatggatttcctatcggagacagagcatggactggccccgtcccctgcaacatcaccggagaactgtttcctggtgaatggagaaccggtatccgttgcgcaaagcagtgagaacgccacggccatcgtgcgtaatctgcttgatgatttgattcaggcttctcacgatttggaaaaccttgacgaagaggacagcgctctggtccgtgaagcggaatccatccgttcccaactggctgaaacgcgattgggagctgatggaagagtccttgaatggaacgacgaattcatcgaatccgatccacagcaccgccatctgtcccacctttacgaactgcatcctggtgcaggcatcacgtttaagactccgcgtctggaggaagccgcgagaaaatccctcgaagtgcgtggcgatgatggttccggttggagcatcgtatggcgcatgatcatgtgggctcgtctgcgtgatgcggaacacgccaaacgaatcataggcatgttcctacggccggtggatgcgaacgccgaaaccaatctgctgggcggaggagtgtacgacagcggattatgcgcccacccgccgttccagatcgacgggaaccttggattcccggcggccttgtcggagatgctcgtccaaagccacgatggctggattcgcgttcttccggccctgccggaggattggcatgagggaagcttccatgcgctccgcgcaagaggtggaatccaagtggatgcgacatggacggatcagacagtggaatatacgttgcgctgttcgaagcccacggagattacgctgaacgttctggggactgatatgggacgtgtcgcattgtctccggataagccattcaagggaaccatccggcgttaacgtattgcgttatatccgttactaaatgttgcggaccgtctttcctaatagaggaggacggtccgcaatctttttttgatgggaaaggagattccgccattttccacgattggtatgcgcagatgaacctgtacagtgaaagctatgcgtgtaatttctggacgattcaagggtgtggcgcttgctacgccgaaaacgggtacccggcctaccacggatcgcaccaaagaggcgattttctcgcacctcgactcatggggagtgctggatgatgcccgtgtactggacctgttcgccggtactggtgcgttgggcatcgaagcgctgagccgtggcgcgcgagaactcgtggccgtggaaagttcccggcctgcggcggcgctgattaccaagaccttgtcgcagttacagaagaatcgttcgtgggatgcctcgctcaaggcccgtgtgttcaccaaaaaggccgagcaagtgtctggcggctttggtgaatcctttgacgtgatattcattgatccgccctacgcctatgagaccgctgaatgcaatcagttgttggccaatctggcggtgggcagcgccaccaacgagaacaccgtgattatgctcgaacgctcggtacgctccgacacccccaccgcccccgaaggctggcaaatcactgaaagccgcaactacggcgaaaccgccgtcttctacatcgagcccgcggatgacgactcggatatagagcgttccgacgattccgccgcgtagtgaatctcccgccgtgtggtgaattaatcggcgagccggcgcggatgggtggcggagacctcccagcccaaggccatcagggtcttgcggtcggccttatccagcgccttgcaatccagtgccgcgataaggtctggccggatctcggcggtgcgggccagcgcttcgtcgcggcgaaaacggtccaccttgccgtggtcgccggacaacagcacgtccggcaccgcaataccacgccacacggccggcttggtgtactggcgatgttcaagcagggcgtcctcgccggtgtaggactcctcgacaatcgaatctgggttgcccatgaatccgggcatcaggcgggtgatggcctcaagcatcaccgacaccgccacttcgccaccgttcagcacatagtcgccgatcgaatattcgcgtacgtcgacgccctgggagcggtagtagtccgggatgcgcgcatcgtagccctcataccggccgcagccgaacagcagatggtcggcatggctgagctcggtggcgtcgcgttgggtaaacaacggggccgatgggttcgggaagatgagcaccggtgtgccggatagggcggaggattcagacggccgcgagaatcccagcagttcgtccaggcattcgctccacacctcgggcttcatcaccatgccggccccgccgccgactggcgtatcatccaccgaatgatgcacatcgtgggtccagtcgcgcaggttgtgcgctttgatctccaacaatcccttggcctgggctttgcccatcaggctgaggttcatcacctcaaagtattcggggaacacgctcacgatatcgatcttcatgttatccagcctaacggtagccccgcccgcattacacggccaccactacactattgcggtgatgaatacgacgatgaacctccccacccgcaaaaagcccgaagtgttgtccccggccggcaacctgaggggcctgaaaaccgcggtcgattatggtgccgacgccgtctactgcggcggcaaagccttcggcatgcgatcggcccccaaaaacctaagccttgaggactttgaggaaggctcgcgctacgcccatgaacgcggcgcccgcgtgtacgtgacctgcaacgtgctgccgcgcaacaacgagatcgaagccatgcgcgagtacgtcggccagctcaaggacaccggcgtggacgcgctgatcgtctctgacatcggcgtgatgatgatggcccgccaagtggctccgaacctggaattgcatgtctccacgcaggccggcgtcaccaattaccaagctgcgaacgccttctatgagcttggcgctcgccgtgtggtgttggcccgcgagatggacttgcaggccgtgcgtgatattcgcgccaacattcccggtgaccttgacatcgaatgcttcgtgcatggcgcgatgtgcatggcgttctccggccgttgcctgttctccaactatctgaccgggcgtgatggcaatcatggcgaatgcgcgcagccatgccgctggaagtattcgatcgtggaagagaagcgccccggccagtacttcccgatcgagcagaccgagaacggcgcctatctgttcaattcgcaggacatgaatatgctggggcacttggatgatttgattgactccggtgccaccagcctcaaaatcgaaggccgcgcgaaaagcgcctactatatcgccgccatgaccaacgcctacaaaaccgcggttaatgaatacatgattcaacgcggttttgaagacgctgatggcaatgttctgaagcctttccgtgaccgtgtgattcgcccgggcgaccccgattttggccaaggaaccgaagatcaagtgatgagcaatgccgatgccgcgttcgccggtgtggccgatgagggatatgaccgtggctctgatactgcggttgccgattcggtcaccggctcggttgccgcagaacgtgaccgcgtgacggttgctgatgccgccgactcaactgcctctggtacgccggccggcaccgccgtcgaacccgacggcatgagctcccacgcccgctccacgcgccgcaagtccaacaccgcggtcgaacagatcgagaccgattggaagcatgcggccgttcgcccggccccgcacgtcgaactgcccgaatggctgctcgaggaaaccgacaaggtggcccaccgcgactactccaccggcttctattatccggagcacaaggtcacacagaacaccgaccgctccgcctacttccgctcatggctggtagtgggcgaagtgctgagctggagcgcggacgaaggcggacgtgtcacgctgatgagccgtaacaagatcgagcccggtcaacaggttgaattcctgctgcctggcgagagaccattggtctttaccgtgccggaaaccggcctgcgcgatgccgatggcgcgccagtacccgccatcaataatccggcgcacgtgttctcgatgccctgcccgcaccaggtgcccatcaacgccgccatccgctcgcgcaccaaaaagcccaccctcaaagccgaataacctaccactccgcccccgctgactgggggtggtcatgggaatcatgaacaccgcccgcacccaagaaagaatgccttatgcctgaatacagcgaagaaatcctcgattccaacagcatcagctctaccgataaagccggtcgccctattccggtgaccatccccatcgcactgtcccccggcatcaaggtggtgtacaccacgcgactgggcggcctgagcgccggcgattacggcaacctgaacctcggcggcaagtccggcgacgaacctgaggccatactgtcgaaccgcatcgcactcgccgaagcggtgcaagcccgcctatcgctggtctcccaagtacattccggcgtggctgtggacgtggacgactcgttcgtcatcaacacccccttcggcttcgacgtgtccggcacacatggtgagactgacactccgcacgtcatcgaggcggacggccaggtcaccgcacaatccggcatcgccctaggcatgttcgcggccgactgcctgccggtgctgctgggcgacccggtcaccggcatcatcggtgcggcccactgcggccgtcgtggtctggagcgtggtgtgatcggcgccacggtagacctgatgaagagcaagggtgccgatccggcgaacatcgtggccacactcggcccgcgcatctgcggcgactgctatgaagtgggcgacgagatcgccgaccagttcatcaagcgcttcccgctgaccaagacgaagacccgtttcggtggtgccggcattgacatcgccgaagccgcgatgattgacctcgccttcgccggcgtacatcaggtggtcgattcgatgccgcgcgtgcacgccgccacccagtaccttgaggaagacccggaactcgccgaactgtgccgtacggacggcgaaggcccggccgagctcgcggagcgcatcgacaacatcagccacagcatgtgcacgctcgaaaacccactgtggtactcgcaccgccgcgccgcgctcgccaacaaaacacacgaaggccgcctccttgccctcatcgtgcgtgactaaacggagaatgcgggcacattccgtggagaagatgtgatgcagttcacggacggccagccctcaccctacggtggtgcctatgactgagagagatttcgatacccccgtcgagacgcctaccgtccaaccagcccccgctcagggcgccaaaccggcacaaaccgtgccggtggtggccgtggtgctggccgctggcttcggtacgcgcttcgaccccgacaatcccaagcagcttgtctccgtgggcggcaagcccatcgtgtgctggagcattgatgcctttgaacattgcgatcgcgtcagcgacatcgtggtggtggtcaatcccaaggtgcgcggtgaagtggaaacgttggttggcgagatgggctacaccaaggtccgcgtcatcattgacggcggtgacgaacgtgtggacagtaccgccgccgcgctcgacatgctggctacggcaggcattccggacgatgccaagattctgatccatgacgccgtccgtccgttcgtggaacagtccgccatcgacggttcgattgatgcgctcgaccagttcacggccgcgaccgtggcctacgcctcaaccgacaccgtgctgttgaccgaggatctgggcgatctgaaagtggtcaagtcggtgccggaccgcccgaacaccttccgcgcgcagaccccgcaatccttccgcttcgcgacgattcgtcacgcttacgatctggctgccgccgacccggacttccatcccaccgacgacacgcgcgttgtggtcgattatctgcctgatgaacccgtcgccattgtctccggtgcggaaaccaacctgaagatcaccacgctggaggatattcccacagctgagcgtatcgccgaggagattctcggtcgtgatcccaaggaagaggcccgcgcccgcatgcacgccctgctggcccaagcggccggccagatgcatcgctagactggcattatgcgtgaactcaatgttgtgatctccggcttcgaccactatgacggcgtggaggtcaatcccgccgtcgaagtgcccaaggccatcgccgagcaggggttgggcgtctcctctgctccggacgatccgttggagcaggtcgccgtcaccgttcatgccgtcagcatcccggtgagcttcgccaaagcctggcccacgctgaaagagacgattgaggccaccaagcccaatatcgtcatcgccaccgggctcaagcatgcagcccgaggcgtgatgcttgaacgatgcgccaccaacctgatggacgcgatcaagccagacgcggacaacgtgatcccacgccgcgaacccatcgaccccaatggcccggccgcctattggacccgcctgccgttgcgctcgatcctgaatgatttcacggacgattcgattccggccaccctgagttcggacgcaggtacgttcgtatgtaattcgctgttctacaacttgctgaactggaccgccacccaggagcgggtgctgggcggattcgtcagcttcccgccggtcgtgccggcggattccagccagcatggtctgccactcgaccagcagatcgccgctggccgtgatgtggtgcgcgaagccgtgcgctactatctcaagccctccagctccggcatcctcatcgcctagcacgctgcgcgccacgccggaatagaacatggttcgcacgcattgtaacgattgcgcgtcactcaacgcccagcgctagtgcgatgcgctacagtgcttcaaggatgtgccaagagctttatgcgtgtgcgaaaggaataaacagcgatggtggatcgtttcccggtggtgctgcgaggatatgacaaggagaaggttgatgctgccttcgacgctactcaggagagtgtgaagcgtgcgcagcagacgctggccagcatgcgtgagcagattgcggcggatgacgaccgtattctgcaactgcaggcccagcttcaggaagagaagaacaagaagccggaaggcaacagcttcgcttccctgggggcgaacgcccagcagatgctcgcctccgccgagcagacgagtaccgaactgttggaacgcgccaagcaggacgcatcctccatccgtaccacggctcaggctcaggccgaaacgctgatcaacaacgccaagctggatgcccagcatattgttgacgacgccaatgccaaggccgcctcgattctgacgaacgccaacaatcaggccgaatcagtgaccacctccgccaacgaggacgccgcacaactgcgctccgaaaccgccaagaccatcaccgaacagcgtcagaccgtcgagcttgagctcagcaacgcgcgcgaagagcacaccaagaagatggcttccgaacgctccactcaagagcgcgaaatcgccgacatgaaggcggaggcgacccagcaggttgccgcaatgcgcaaaggcgccaatgaggagatcaccaagcttaagtctgattccaacgatcagattgaggcggcgctcgccgaggccaacaagaagctcgccgacgtgcgcgagcaagtgtccaagatgatgaccgaagcccagcgcaaggccagcgaaatcattgatgcggccaaaaccaagggtcaggaaatcactgatgaggccgaggtcaagcgcaccagcacgatgagccaggtcaacgccgaggtcgagcagatccgtcacgacatcgccgctcagcaggatgaggccacgaagaaggtcaacgaactgctgcagcacctcgaagagcgtcgtgtggcggccaagcgggaagccgatgagttggtcggtcaggccaagaacactcgcgaccaagccgattcgtatgccgcgtccaagcgcgaggaggcggacatccaggccgccgcaatcgtacataaggcgggcgaggaagccgatgcgcagatcgaggagcgtcgcgccgccgcccaaagcgagcttgacggtctgtccaagcgcatcgccgatctgcaggaacgcgagtccgtcatcacccagcgtgtttcggaactgcgttctatgttctcgcaggcgttctccggattcgctttcggcggtaatgcggcggcctctggtcaggatcaggaagccgctgccgcggcggcattgccggtggttgcgcccgtcccggaagtcaagcctgtacacaacgaggccgatgaccagccgggtgagttgagcggaaacgagtcggctgccgacgatcacaatgagacagatgcggcaccggctgattcggctgattcggctgattcggctgcgcagaatgagcagtccgaatcgtctgagccgtccgagcaccagacacagggcgaaccggaggccccgactcaggagaatccggccgtatctgagcagaacggcgaatgacaggccttcgattagactactagcggtaagaattacggcacctgcgctttcgagccaggtgccgtattcgtttgaatctgcgccacaagcgcaccatcacagaaggagtatgacatgagtgaattgacgcctctgaccgacgaagcgttgaataccctgcgcggcgatttcgcacagagcggcaccaaccgtctggccatgaacgcggtgaccgccgccggcatcgacaaggtggctcgcaattatgaccgcgctcgtctgatgcagcgtcgtttctccaccatcgttgacaatggcgaagccacccatcaggatcgctccggccgctgctggctgttcagctccctgaacgtggcccgtttcgtggccaagaagaacatgaacttgaaggagttcgagttctcccagaactacgcgatgtactacgacaagctggagcgcgtcaactacttccttaaggatgtggccgctctggtggctgccggagagccttccgactcccgcctgatgcagcacctgctcgccgacgtgatgggcgatggcggccagtggaccatggccatgaacgtgtacaagaagtacggcgctgtgcccaaggacctgttcccggagaccgaatcctccaagaacaccggtgaaatgaacacccagctgcgccacatgctgcacaccgccgtggcgcacatgtacgccgctgacggcgatgcctccaaggtcgaggcgattattgccgacgccactgctgccggccaccgtattctgaccatccacctgggcgagccgccggtttccttcgactgggaatggaccgacaaggatggcgaattccaccgcgacggcgagattacgccggttgagttctggaagaagtacgtggggccggctgatcttgaggactacgtgtgcctggtggacgatccgcgcaccgagcacgccaagggcaagaagatcggcatcgagcacctcggcaatgtggctggcggcgacgccaccgagtacctcaacgtgccaaaccagttcatgaaggactgcgtcaagcagattctcgttgagcagggcattccggtatggttcggtgccgactgccacccgttcatggaccgtgagaacggcgcttgggccaccgacctgttcgagtacggccgcgtgtacgacgtggacttcgatttggataaggaagcccgcgtgcgcttcggcgactccgccatgaaccacgccatggctttcgccggcgttgacgtggccgacgacggcaccacccgccgctggcgcgtggagaactcttggggcgccaagatcgccgacaagggctacttcaccatgtccgacgactggttcaccgaatacgtctacgaggtagccgtcccgaaggccctgttgcccgaggaataccagaaggccctcgaagagccagccaccatgctccccgcatgggatccgatgggcgctttggcctgacttcgtcagcctcccggaatcggcctgacggccaatgctgtgttttctcgcagcctgtcggctgctagggtctctccctctgtcagcgcgaagccgctgacagagggagagaccgcagtcgcaggccgcacaacaacacagcatcgccgcaggcgagtccacacaggcgagtccacccaaagtccataactgccggcccaacaagcagtccccgtaacaaactgctatagttgggcttttgcgtctatggcgacataccgacagtacgtatacaaggaaaggagtcgagcaatggcagcactacgtggtccggatagttccgaggatgaacgtcgtttgggggagcaggccgtctttcctgagaccgtcgatgtcaacattcgtcagcttgaccccattcccgcgccgcgtgctttcctcagggagcagccgctcaccgatgagatgagcgagctcgtgctccactcgcggcaggaaatccgcgatgtgctcaacggccgcgacgaccgactgctcgtcatcgtgggcccctgctcaatccacgacccgaaggccgcgcacgagtacgcagaaaagctggctgccgtcaagcgcgagttggaagaccgactcgtgatcgtgatgcgcgtgtacttcgagaagccgcgcaccaccatcggctggaaaggcctcatcaacgaccccgatctggacggtcgcttcaatattcgtaagggcatgtggctggcccgcaaggtgctcaccgacgtgctgagcctcggtctgcccgccgccaccgaatggcttgaccccatcaccccgcagtacatctgcgacgcgatcagctggggtgccatcggcgcgcgtaacaccgaatcccaagtccaccgcgaactggccagtggcctgtccatgccggtgggcttcaagaactccaccgacggctccatcaaggccgccgccgattcctgtttcgcggccggcttcgagcatcacttcctgtccattaacttggacggtcgcgtgatttccgccgaaaccaaaggcaacccggattgccatctggttctgcgcggctccagccacggcccgaactacgatgccgaatccgtgcgtcaagctctggaagacctcaaggtttccaaagcgtccggcccgagccagcatggcctcgtcatcgatgccgcccacggcaactgcggcaaagacgaaaaccgcgaagccgaagtcatcgaagagatcgctgagcgcctggcgcacggcgaacaaggcatcaccggcgtaatgatggaaagcttcttggtcggcggtcaccaaaagccggccccgctcgaccagttggtctacggtcagtccgtcaccgactcttgcgtgccgtgggaacgcaccaacgaactgctgcacaccctagccgacgccgtcaccgctcgccgctcggctaaatagctttgtctttgtaaaaatgctcactgagacccactcagtgagcattttttgccaataacggtggtcatgtcagtttgttcccgtgacaccttatccttgggaaggatactgacccaaggagagatgttatgcagcagcaggaggaagcagcacattcgctgcatccgttgcaagtcggtccgcagccgttgaacaccccagaagagcttcgcgccattcgtcaggcgatgggggaggggaagaacccgctcgttgccactgatgtgccgcgttgggaagatcaggtgggtgtcagtcgcatcatcaaccgccgcgtattggagttggagccgctgcccacgcccgcgcaagtgctcgctgaactcccgctgactgatcaggctcaggaaatcgtcgcctactcgcgtgatgagattcgcgcgtgcctgtacggccaagacgacaggctgttggtcatcgtcggcccctgttcggttcatgacccgaaggccgcgctggactacgcgcgccgattggccaagctgaaagatgagctcggtgaacagctgctcatcgtcatgcgcgtgtacttcgagaagccgcgcactaccattggctggaagggcctgatcaacgacccggatattgatggcagccacaatattcgcaagggcctgttgcttgctcgcaaaaccttgcttggtgtgctgaaggaaggattggcggccgccacggaatttctggagcccaccagcccgcagttcatctcggacgcggtgagttggggcgccattggtgcgcgcaacacggaaagccagatccaccgccaattggccagcgggctttccatgccggtcggctttaagaatgccactgacggctcggtgaaggcagcggtcaacggttgcttcgccgctgctcagcagcacacgttcttcggcattgaccatctggggcgtgcctgcgcagtcgagacccttggcaacccggactgccatgtggtgttgcgcggctcgattcacggcccgaactacgatgccgaatccgtggccaaagccatggaagacgtacgcgccgaaatgcccgccgaatccgcagcctcgcatggtctgattgttgattgctcgcacggtaactccggcaaggacgaacatcgtcaggccgaagtcgtgcgcaatattgccagcagaattgcagctggcgaacagggtattaccggcatcatgatggaaagctttattgaaggaggcaatcagaaggccgcgccgcttgatcagctggtctatggcaagtcgattactgacaagtgcatcagctgggaagaaaccgaggccttgctgcgcgagcttgcggaagccgtagccacacggcgttggcactgagttgcgtcatcggctctctcgcgggagcaatgcaacgaaacgtctctacccctcagcctgccattcggcggccacctcccctgacaaggggagccgaaagtgttgtgaaaggaacttacgtatgggtatgaaaactgtagctattattggcgcattggatgaggaagtggcgctgatcgccaaatcgctcacgcatgtgacgcacaccgccaagggcagccttgacatcgtgtccggcacggtcgactccttcggttctgacgtcatcaaggttgccgcaacggtaggcggcatgggactggtcaatgcggccgccaccacgcagctgctgattgacgagattgccccggacgccgtgattttcagcggcatcgccggcaacctcaacacccacctgcacatcaacgacgtggtgctcggcggcaccctgcgctacctcgacactgacatgcggctcgtaggccagtggaagcccggcactgcggacgctccggtggaggaattccactctgatgaccgtctgctggaagtcgccgacgaggcgcttgccaatgcgggcattacccacatcaccggcatcatcgcctccggcaactacttcgtggacacgccccaaaaggtcgaggaggtcatccgactcaccggggctgacgccgtggagatggaaggcgccgccgtggcacaggtcgccgcccgcaataacgtgccggcactggtgattcgtgccctttccgacaacgccgacaccgattacgaggtattcaaggagttcgacatctccgaatacgccgataccgccgcccgtctggctgtcgacatcgtcaagcgcctgtaactggtcacctccaagttcggcgttgccggtgtgggctggtacatggctatcatgactgccctcgctctgctcgctctgttcctgatcaaggaaagcaaggacaaggactacgagctgtaaatagagctccccatattatgctcccgccagcgggagcattttgttatgtcgtcccgccaaaaatgaacaatagacgaacttacgtagtttaggcatctcactacgcctcgcacgttttactctggaaatcatggatatctggcagatcgtcgtgattgtggtgctcgccgcgctgatactggtgtgggttgccgtcatcgcctacaacaaaggccgcgtttcaggccggctcgccgccgaacaggacctgtccggcgacgaggatacgcattctctattcggtgatgatgcgcccgtgcgccccaccgagcgtcgcctgattgaagtcctgcccgaagccctgatcgtcaccgaccgcaacggtctggtccaatattcaagccccggctcagtgccattcggcctagtctccggcgaccgactcaactcgcgtgaagtcgaggacatcctcactcaggccgccgccgacggtggcatgcgtgagcgtgaggttcagctgccggtcaatcgcaattcctatccgtcctctaatggccgaggactggaggccggccagtcacgcccgtccaacacgctgtatttgcgtgtgcgcattggcgatatcggcgatgacctgtacgccatcttcatcaacgacatgtccgagcagcgccgtttcgaggccgtccgccgtgactttgtgaccaacgtttcgcacgaactcaagactccggccggtgccatcgcgctactggccgaaaccgtgaccgacgccgccgatgatccggacgccgtacggtatttttccggccgtatctccaaggaatccgcgcgcctgaccgaactggtgcatcatcttatcgacttgcagaaagcccaaagcccgcaaagcgtgatcgatgcgcggcgcatttccgcgctggatgtggcacgcgccgccatcgccgccaatcagacccaagccgactcccgccatgtggatatccgactgagtgtcaacggacagtcagtacccacgaaggtcgaggagccggccgatggcgaaggttccttggaagaatcaggcagcccagccacgaacggtccgatgatcaaggccgacaaagaggccatgcaaaccgccgtcaagaacctcgtagagaacgccatccattactcgcccgaacacaccactgtggcggtcggcgtgggggagcgcgatggcaaagtcaccattcgcgtggtcgatcagggcatcggcatccccgccaaatcgctggaccgcattttcgagcgattctaccgggtcgacccggcccgttcgcgcgagaccggcggttcgggactcggcttggccatcaccaagcactgcgtgcaggagaacggcggtcggatttcggtctggtcgcgtacgggggaggggtcgacgttcaccatcgagctgccggccgccccggatgaggatgacgacgaggcccggtcggacgagtcgacacaagcgtagggccttggttggtgcccgacatggtgccattccactgccacacaatcacacagtgggcgaggtgcgcacaccgcgcgtagcccaattacgcaattacgtactttcgggaaacagcaggctaacggagaacaaatggttacgataatgtcggaaaactttgcgcctatgcgcacgggaacatacccaagaaaggctactatgacacgcattcttatcgtcgaagacgaggaatcctatcgcgagccgctggtataccagctcacacgcgaggggtacgacgtgtccgccgccgccactggcgaggaaggtctggaactgttcaccaagggcggcatcgatttggtgctgcttgatttgatgctgccgggcattgacggcactgcactgtgccgccgcattcgtgagcagagccgtgtgccgattattatgctcaccgccaagagcgccgaaatcgataaggtcgttggccttgagattggtgcggacgattatgtgaccaagccgtactctttccgtgagctgctggcacgtattcgtgccgtgatgcgtcgcaatcaggccactgcccaggcttccggcactgtggatgacgatattccgctggtgtgtggcgatatcgtcatgcaggttggccagcatcaggtcaccgtacgcggcgaaaccgtgttcttcccgctcaaggaattcgaactgctcgaatacctcatgcagaacaagggccgtgtgatgacgcgtcaccagctgatcgaccgcatctggggttcggattatgtgggcgacaccaagacgctcgacgtgcatgtcaagcgcgtgcgctccaagatcgaggaagatccggcgcaccccaagtatctgactaccgtgcgcggtctcggatacaagatcgatactcccgcggagtaaatggaaggcggccttcgggtcgcctttttttgttgtggattgtgggctcgctgtggactcgccgcaggcgagcccgctccaaaaactacgtagcctcaacgtagcccacaaacatccaagtgttcatcttctgtttactgatttcggttttgggcccttgaaaccaccaatacgcttgtagttgtcatgaattgaccgggcagcgctgagccgcccgcgaatagttgatagagggattaagtaataatcatgcagaagaacatcctcgttcgctccattgccgctctgtccggcattgtgatgctcgcttccgtggccgcctgcggcgataacaccgccaccacgaccgacaacagctcctcctccgattccacttccaagtccaccccgatctccggcaacttctcgggcgccggcgcctcctctcagcaggccgctgttgaagcttggatcgccggcttccagggcaccaaccctgaggccaagatcgcctacaacccgtccggttccggcgctggcgtgcagaccttcctgaccggtgccaccgcttgggccggctccgacaaggcccttgccgatgacgaagttgagcagtccaagtccgtgtgcactgaaggcaccgccttcgatgtcccggtctacatctccccgatcgccgtggttttcaacctcaagggcgtttccgatgccggcaagcacatcaacatggacgctgccaccatcgccaagatcttcgacggcaagatcaccaagtggaacgatccggccatcgccgatcagaacaaggacctgaagctgcccgacaccgccatcaccgtggtgcaccgctccgataagtccggcaccacccagaacttcgtctcctacttcaaggacgtcacccctgacaactggacctacgacctctccgagaactggccgaacgaggttggccagggtgccaagggcacttccggcgtgatctccaccgtcaagcaggccgacggcaccatcggctacgctgacttctcccaggtcggcgacctgggcaccgtggccgtcaaggtcggcgacaagtacaacgagatttccgccgaggccggctccaaggtcattggggattccaagcaggacgacaccgttaagggtgacaaccgcatcgtcatcaagatcaaccacgccaccgaggccgagggcgcttacccgattgtcctggtctcctacgacatcgtctgcccggcctacaaggacaccaagcaggctgagttcgccaaggcttggctgacctacgtgacctccgacgagggccagaaggccgctcaggatgccgccggcaccgctccgctgccctcctccctgaagtccgagatcaccaagtccatcgaggccatcaagaccaagtgatgacgtcggcccgcaagggtcgtgtggactggacctgacaactgaacgatagactgtagtagtaagagcagtcgccgccaactttaagccgcagtcgtaaaccatacggctgcggcttaaagcgggtcaggacccgaacggtttggcgaagtcacagacgaaaaccgcaccacttgaatacttgataaccaccctatataaggagaatccgtgagttcgcaagacaaaacggctgtgcagccagttggaggcaagaccgccgacaaggtgtttcgcggtgtggcatacgcctgcggcatcctgatcctggttgtacttgccgctgtgttcctgttcctgtttttccgcgcctggccactcatcggtggcgatcaggccgccaacagcgacaccgtgtccagctttaccggcggcaaggccagcagcttctggggctacatgctcccgctgttgttcggtactgtgctcgtgtctttgctggcactgctgattgccttcttcgtgtccatcggcattgcgctgttcatttcgcactatgcacctaagaagctcgccaccgcgctgagctatgtggtcgatctgctggctgccatcccgtccgttatctacggtttgtggggcggcctgattctggtgccggccatctacccgttctggaactgggttgccaaccacctgggcttcattccactgttcgagggcccggccgccaacccgtcgcgcaccgtcgccaccgtggctgtggtgctcgccgttatgattttgccgattatcacctccatgtcccgcgatatcttcatgcagaccccgcgcctgcacgaagaggccgcgctggcgctcggtgccaccaagtgggagatgattcgtctggccgtgctgcctttcggcaagtccggtattgtgtccgcctccatgctggctctcggccgcgcgcttggcgagacgatggccgtgttgatgatcctgtccccgggcctcaactactccatcaagctgctgcaggcctcgcagaaccagaccatcgccgcgaatattgccgcacagtaccctgaagccaacgatctgggcgtctccacgctgattggaaccggtctgattctgttcctgatcacgttcgtggtcaacttcatcgcccgtaagcttaccgagaaagcgactgcgtgatgactgctgctgagaacactgaaaagactccgatggacggcacgcccgaaatcgacttcgatcgtttccgcccgacccgttccgccatccagcgccgtaatatcatggaccacttcatgtgggtcctgatcgcggtggcgtttgtgatcgcctgcatcccgctgatctccctgctgtggaccactatcgtcaacggcatcaagcgcctgaacctgaacttcctgagctacaacatgaccggtgtggtcggtggtaaccagaccccgtccggtggttacggcggtgtgctgcacgccatcatcggtactctcgaaatcaccgctggcgctatggttatctccattccgatcggtttgatgtgcgccgtgtacctggtcgaatactcgaaccgcggcaagctcgccaccacggtctccctgctcgtcgacgtgatgagcggcatcccgtccatcgtggccggcctgttcgccttctcgatgttcacgattctgctgggccccggtaccatcaacggtttcgaaggctccgtggctctctccctgctgatgttgcccaccgtggtcaagtccagcgaggaaatgctcaagatcgtgccgaacgatttgcgtgaggcttccttggctctgggcgttaccaagcagcgcacgattaccaagatcgtgctgcgcaccgctctgccgggcatcgtctccggtgccattctggccatcgcccgcgtgattggtgagaccgcaccgttgctgatgaccgccggctacatctccagcaccaacgtgaacctgttctccggccagatgaccaccctgccggtgttcgtctaccaggagtactcgaagctcagcgcgaactgcccgcccaacgccgacgccacctgcgtgaccacgattccgatggaacgtgcgtgggctgcggctctcgtgctgatcgtcatcgtgctgctgctgaacctcattggccgaatcgtggcgaaggtcttcgccgtcaagaccgaacgctaagccagtcgctaagcctaagccttaagaacacaaggaaatataaggaaacatcatgggacaacgtattgacgtcaaccacgaaaacatctactacggcgactttctggccgtggaagatgtgaatatcaacatcgagccgaacaaggtcacctccttcatcggcccgtccggctgcggcaagtccaccgtgctgcgcaccttggaccgtatgcacgagatcatccctggcgctcacgtcgagggcgaggtgctgctcgaaggcaagaacctgtacgacaaggacgtggatccggtggccgtgcgccgcgacgtcggcatggtcttccagcgaccgaacccgttcccgaccatgtccatccgtgagaacgtgctggccggtgtgcgcctgaacaaccaccacctggccaagtccgacgccgacgatctggtcgagtgggctctgcgcggtgccaacctctgggaagaggtcaaggaccgtcttgacaaccctggcatcggcctgtccggtggccagcagcagcgtctgtgcatcgcccgcgctgtggccgtccacccgcaggtgctgctcatggatgagccctgctccgctttggacccgatttcgaccctggctgtcgaggatctgatcgacgagctcaagagcgactacaccatcgtgatcgtgacccacaacatgcagcaggctgcccgtatcgccgactacaccgccttcttcaacctgaaggccgtgggccagcccggtcacctcgagtacttcgcggacaccatgacgatgttcaacaacccgcaaaacgaagaagccgagcgctacatctctggaaggttcggctgatcgtttcctgcgcgcagcgtaatgatttgtgcgtaggagaaacggcaaagcccgtcgcaaggcgggctttcgcatattcagcgcgagtattgccgagtattaccgttctcgtaacggagcgagctggaatacttcgtcagactgggcggcgatttcccgcttcggtcgatcgacgggagaacggcggtaaagcggtacaagacaagtccgcacgatgaacactccgtgataaattttctgttaacgtgcgagtatggaagaatggtcgcagcgaggtccagcaaaggagcataggtgagtactggtctgatcgtcggcatcgtcgttgtcgttattatcgttgtcttgattggttggggcgtcagcgcctataacaacctggtgacgctgaagaaccgtgtgaagaacggttgggcgcaaatcgacgtgcagttgaagcagcgcgccgacctcatcccgaacctggtgaataccgtcaaggggtacgcatcccacgagtctgaagtcttcactcaggtgaccgccgcccgcgccggcgtagtggctgcggcctgcaacccgagcacgaccactgctcagcgcgccgccgctgaaaaccagctgtcccgcgccctgttcaacctgcaagccacggctgaggcatatccgcagctgcaagccaaccagaacttcatggatctgcagaaccagctcaaggaactggagaacaagatcgcctacgcccgtcagttctacaacgacgtggtcctgaagctcaacaccgccatcgaaaccgtgccgacgaacatcatcgccggtttgttccactttgagcaggcgcaatacttcgaggccgatgacgcttcccgtcaggtgccacaggtccagttctgacccgcttcaggcccgtccggtatgccgccggccgggcccgtattgtcttaagagagggaagacatgcggatgcgattcattcgcgccggaatcgtcagcattgttgccacggtggtgttggcagttatcaccttggcgataatcgggacttccgcgttcggcgattcggccgacctcagctaccgcacgctggactatgatgtgaccgccaccgcgaacggtgatttgaaggtcacgcagcatatcgacgtcaagatgcgtgagcgtaccgacagtgacgacaacaccaagccgtggaagcagctgtttcagcaatacacgctgaactccggcaccttgactgatatcagcgatatcagtgtgcgcaacgtcaccgacggcatcgactatgcccaacagagcgagcccaagctgcccagtgacgtcttttccgacaaggaatggaacagtgactacgccaaccattggtatgtcgccgatgtgagcgatggcagcgaccatccaaaggcatacacgcccggtaccgatggcctcaagcccagcgcctccgccaccgaagataacacgaccgtggagatcggctggaatattccggtcaccaccgaggccgacagtatgaagttcgacgtgagcttcaccatgcacgatgtggccaccaaatggaaagacgtggcctccttccaatgggagccgttcggcaagaagaaccaagtgcctatcggcacggtcaccggcaccgtccacttccccaacggcatcaccggcaaaacctcatgggcatggctgcacaccgagcgcacttcggaaaccaagcgcaacagcgacggcagctacacgttcacggcctacaacatccacaatggcgactacctcgatgtggtcgcggcgttcgatgccgccaaagccaagggcatcgcccgcaagggaaccggcaatcatctcaaggacctgaaacaggacgaatataagcaacagcagcgctggctcgacaagcaacgattcgctgccagagctcgtctcgtgtcctggattgtcagcatcgtgctcggcatcgcgttgtgcgcgtggggtatctgggctgtgatctccagcaaccggcgtgcgcaataccgtggcagcgtcgaatactggcgcgaccagcccggcatcagtccggcttccgcagcccgtctgattcgcgtggtcgatccgtcgacgcgccaatccgatgaagaccgccagctgaccgccaccatgctgtcgctcgccgtcaagaaggccattgccgtctatccggggccgtcggacatgtatcgcggcatcgacatgagccaggccacgccggtaggcttgagccaaatgattgccgccgaccaaggcaagcagtatgcggcaggcatcaccagcaccatcgtgattctgccgctcgccattgatgaggcacccaacgcgcaacagttgggattgagtgaatcggaagatgcgctgctgaacctgctcatcgtcatttcgcagcgcgtgggcagcccggtattcgacctgaaccagatgaaggcgacctgccagaattggcaagacggctatattgagctcggcaaattcaccggtgcatgcagcatggaataccagcggctgggtgccacgcgctctgtgggctggcaatggatcctacccggcgtattggccgccgtgctgggatttggttcgctgctggccaacagctttatcggatacccggtggctggtcttatcgagctgccgatattcctggtcggcctgttctgctcgatggccggcgcgatgaccgtgctcaccgaccaaggccaggatattgccggccggactctgggccttaagcgttatatggaagacttctccaacttcaccgaccgtggtgccgccgatttggccttgtgggattggtatatggtctacgccgccgcgtttggcatttccgatcgcgtgatgcgtgagctggccaaggcctatcctcaggtcaacgatccggcttggctggatgccaacgcctccaactcgttgttctactggaactaccgcccgtatggctggtacagccaccgccataatggtccgttcgaccacgatgctgccgggcagatggacccgggcattagcggcccagctccggcttacggaggcacatcgtttgccggcggattctccgacctcggctcgcagctgaactccggactcgctgacatcagctcgaccatcagcgcggcagcaccatccgccgattccggtggcgatttctccagcttcggctcgggtggcggctccggtttcggtggctcgttcggcggttcgggtggcggctcgttcggtgggcggtaaatccagcgttctgcttacgctggaatcggacacagaccgtctcattactgttgaagggaatcaccatggcattgttccgtaacctcggaccgttctccaccaccgccatcggccacggcgaaatgccgctgaccatcgaaaacaatcgcggccacgaggtcggcatcgaaaccctgcatgcctcgctggacgccggctgccgccacatcgacaccgcttgggcctactactgctccggcggcgaagaacaggccggtgaaaagctggtgcgcgaggcccttgagacctggaaggggccgaaggacgaggtgctggtggccaccaaggtgggccacttccgcaacttcaccgacggccgccccacgtgggatgtggacggtcgcccggagaacctgattcggcgcggcaaggagagcgcactggcgctcggcgtggacaccattgacctgctgtacttccaccgccctgatccgaaggtgccgtacaacgagtccgtcgaagccatcaagcagctggtggacgagggcgtggcgcaggaggccggtatctccaacgcctccatcgagcaaatcgacattgcgcgcggtattctgggcgacaagctcgtggccgtgcaaaaccagtactcgccgattcacctggagacccaggacacgctcgactactgcgccaaggttggcttggccttcgtgtgctggagtccgctcggcggctaccgtcacccctatgatgagaccaagttcgacccgttccgcgaggtcgcggcggcccacggcgtgagctaccagcaggtcgtgctggcatgggagctcgccaagggcgaccacatgttcgtgattcccggcgcgcaccgtcccgaaaccatcctcgactccctgaaggccgaccagctcgagctcacccccgaagagctcgccaagctcggctgattgcccattccccatcctcccgaatttgtgccgctgacgttggcttaacgtcacaaattcgggaggattgattcgtcttgaaggaaccgtcatgcgcaaaaaactcatcctcgacctcgataccggcatcgatgacgcgctcgccatcgcatatgccctaggcagtgccgacgagatcgatttgatcggtatcacggccacctacggcaatgtcgcggtgccgctggccgcgcgtaacgcgctggcggtactgcacttgttcggccgtgacgacgttccggtctatcccggagtcgaccatcccatcgccccggcaacattgccgaaaatgcgtggcaccacaccagacgagcgggcccaggcctacgcgcgctggcagaacggcggcgcggacggctggcaaacggacgcttcgtggtcaccaactcccggctcggtggcggtccaccatcccaacggcatcggcggcgcaatcatccccgactccccgcgcgctccggaagcaccaggctcggcggtcgatttcatcatcgccgccgcgcgcgaatacggcccggatctgaccatcgtacctacgggcgcgatgaccaccatggccaccgtattccgcaacgctccggacttgaaggattccggtgtgaacgtgacgttgatgggcggtgcgttgacgctgcccggcaatgtgagcccggctgccgaagcgaacatctcccaagacccagagtcagcagactatctgttcaagtgtggcgcacgcaccaccatgatcggcctcgacgtgacccaccagaccgcgctcgcccgtgagaaagcccatgaatgggcgtctctggggacgccggccggcgacttcctcgtcaccatgaccgactactacatcgatttctacctgaagaaccagccggaaatccacggctgcggactgcatgacccgctcgctgtggctgccgcgcttgacccatcattggtcaccacgttcggcttcaacctacaggtcgatttggagggcccgttccgtggccgcaccattggtgaccgctcgcggctgcaagatttcgacaagcacactcaggttgcgctcggcgtcgacgtgtcggaattcctcgaccgctttatggctcgcgtcaccgccgcggctcgtgggtaaacgcttatgctttggcggtcgtgtcggttgctgaagcgtcggttagtagtgtgcggacaatgcggttctagcttccggagtgatccacatggtgtgtggataaccctgtggataactagcggtacgattcgtcgtcgtgtatatgcgggatggcatcggtcggtgtgcatatgtttatacacttcaatatgctggagggtgaatgttccatgcctgatctacggtgacgggcggcaagcgacgaggtgtatggatggttactgcaagggatgtggcaaagcgcgccggggtgtctcaggccacggtgtcgtatgtgatgagcggtagcaggcccatttccgaagccaccaaaaaacgggtgcgcaaggccatggatgagttggggtatgttcccaatatcaatgcgcgatcgttggcgggtggcaaggtcggtgtcatcggtgtgctggtgcatatggatgagaataccgatttggccgagcttcgcccgttcctggtggtaatcatggaggaggcgagaaagcgggggtctagtgtgatgctcgttccggccgacgaggggattgagggactgtgccgtatggtgcgtcaaggcgtggtcgatggcgtcttggtgttcgacgtcgagtggcatgatgaacgcctgcctgagatagcgcgattggatattcccgttgtgctggtgggtacgccagaaaacgcacatggcctgccgtgcgttgatgtggattatcgtcgagtggcgcagatggccgtcaatcgtttggcggaacgaggggcgcagcggatggtccttgttggggactggggaagaagtctcgaccgttatgcgtttgctaagttcttcgccagcgaatctcgtgtggtggctcaagtgctgggcatggaatatgagatattcatcccgcgtgaaaaaggatggaggggcatctgggcgatgaaggatgaattgaagcgaatggctcaatgccatggcggtattgcagtgcgcacccctcaggtgttagattcgctgctgcagctttgtgtggaaatgcagattcagcctggacgtgatttttccctggtcgcggtgtatgtggatggtcatgacgaagagttgcgcgtgccggtggataatgtggatccagtgccgcagtccgtcgccaaagccgccatggggctactgttcgatcggattgatggacataaaactggtgaaagattgctggtttctccgcatatcaccatccgtagctaaggagtatgtccgattctcggcctcgtgtggttcttgacgtcgcgtagtttatgcgcatcaacacgccggtgttgcgtgcgtcggattcaatgatatattcatttatgcgcatcaatattgaagcgtataactaactgaaaggacttagttatgaggggtaatacaaagaagttcgccctaaagtcagccgtggcggtggccgctacggcagccatggtcgtgccgatggccgcatgcggttccggtaccgcaggtggcgggaaaaccaagatttcgttctattcctacttcaaggacaaccagattggtgaggtcgtcaaggggttcgagaagaagaaccccgacattaccctcgacgtgcagtatggccaggatccggcacagtacatctcgacactgcaaacccgtcttgctggtggcaaggcgccgaccatcttcaatctgacgatggataaccgtaccgatgtcatgaaatccggtgccgcgttggacatctccggcgaggatttcctctatggcatcgacgacacaaacttcgccttgttccagcaggatggcaagacctacggcatgccggtttccgcatgggtgggcgtgttcttctacaacaaagacattctcaagaaggccggatgcgataaattccccaagacctgggatgaattcatcgagatgggcaagaagatcaactccaacggaagcaccgctttcctggaggacttcaatactcagatcgctggctcgttcaccggcttgctggctagctattacggcgagcagggtaagtccggcgatcttgacgcggacatctggtccggcaagtccactttcaccaaggactggactccggtattcaagaaatgggaagctgccgccaaggccggtgtaattcctcagaaatccgttggtctgtcggccgatcagatcaagcaggaattcgtgagcggcaatcttggcgtcatgcgctccggtccatgggatctgcctgatctgcagaagtcagacatcgacttcggggtggcaccgttcccggcctacagcaaggaagacggccagtggatcaacggtggccccgaccaaggcttcgccatcgcgtccaaggcctccgacaaggagcaggccgcagccaaaaagttccttgcctatctcaacagcgaagagggcctcgaggcgtttacctctgccgctggcaccctgtcgctgtcgagcaagtacaatgccgaacctcctgccgaactgaaggatgtagtggataactacttcaagcagaacaagttctactgggtcaactggccgaagtcccctacggtgatgtccaccgaggatatcgcccagcagcagaagatcgtgcagggccagatttccgccaaggaggctgccaaggctctcgacgccaagtgggcgacgctgaagtaacccatcacaccaccagttcctttctctcctcctgacaaggccgtgccgatcgcccgttcggcggcaggcacggccttgctatgtcaaatcgaccataattctcaaggacttcccatgaccgctgcaaccattgggcatgcttccaaaccaaaatccaagcgtgcatcatccttatgggcggaaaacctctcctcattctggtttctgctgccaatcatcatcatcttcttcatccttaccgtcgtgccgttggcacagtcgttcttctattcactgaccgattacgacggatactccgaaaacttcagcttcgtggccttcagcaactacgttgcgatcttcaaggacccgtcgctgttatccgccctgggcttcaccctgctgtatgccttcggcaccacactgttggtcacctgtttcgccattccgctggccgtgaccctcaacaaagccatgtggggacgtagcttcgcccgttcgctgttcttcttccttggtgtcccggcgcaggccatcattggtctaatttggcagtacatcttctctccactgggttccggtgtgatgaacaaagtcatcgcggtattcggtataccgaatatcccttggctggccgatgacaattgggcccggttctgcgtgattttcgtggccgtatggatgcaggtcggctggcacgccaccctgtacctcgcctatctgcaaaccatcccggcggacctgtacgaacaggctcgtgtcgacggtgccaattcccgtcagcagttcttccatatcactctgccgcagctcatccccggcatcgtcgtctcgatgttcctcttgatgaccggcggactgaaaatctacgatctgccgtacaccttgaccggcggtggccccggatacgccaccaatacgctgtcccaggccatcatcctcaaaggtatcggccaaagtcagtacggactgggctcggcgttgtccgtatgcttcaccatcgcctgcattctcgtcatcgccgcgcagaccggcattgccaacgccgtggaaaagaggttccaatgacaccgtctcagcgtgaactcgttcgcaaaatctttcgcaccatcgtggtgcttggcctggccctgatttgcgccgtgccactgtactatgtgatcgtcagctccttcaagacctcaatcgatatgatcaagaacccattggggcttccggagcagtggacgctggagaactacaaggaggccttcgccgacggcaccatcattcgtgcgttcgtcaacacgctgattgtcaccgtggtggcggtgctgctgcaggttctggtcggttcgatggccgcattcggcgtggtatacaagaaatccaagttcaccgccatcgtcggtggcgtactgatggtcaccttcgccattcctgtgcaggccacaatgctgccgctgtaccgcatggagtccgagaccggacttgtggattcgctgcttggcttgattgtgctgtatatgggctcgtgtgtgttctgctacttcctgatcgtcggctacatgaagtccctgccacaggaattgttcgaagcggccaaaatcgacggtgccggcccatggcgcatctactcgcgcatcgtgttgccgctgatcaccccaatattgaccaccgtcgtcgtattccaaaccatgggcacttggaacgacttcctcctgccgagtgtgttcctcagctccacggataaccagaccgtcgtgctgcaggtatacaacgccgtgcagcagttctccacgaactggcctctgttcatgaccatcacggtgcttgccctggttccggtgttcattttcttctgcttctgccagaagtggattgtctccgggttggttgccggctccgttaagggctgaggacgaaatgagatcagtcatgagtgacgtacagaatgttgcacagcaagccgctatcgaacgtgctgctgcagaagccggtgcctcaacggatttctctcaattcgctggaagttcgctgccgttcggcaatggccaggttcttctggatcaatccaccggtgctcccatcgcttttgtgaacgaagataatcccaatcgtcattatctgctggacgacagtgtctcttggcacacatcggaccagtattggggcagcggctatgtggtcactaccagtggtggctcgcagtggaacacgccgcaggtatatggcataaccaatggtctggaacagcagacgttcgcactgggcggtgcgggactcgccctggacgttacccgcagtagcggcgaacggctgaccgagcgttatgaatggcgcaacgtttcgaaccagccggtgaccatcacaggcttgggcatccagaccccattgaacgaccggtatccgggcgctcgcaaatcgttgagggaatgtgtgcatgcgcatatattcgcgggaggcgactggagctgggtgctggccgagccgatggacggccgcggtgcgcgcttggggctgatcgttacggaaggcgcaatcaatgcctatgccatccaatcgcgtaaccaggtcacgtattcggatatccgcgggcacatcgtgctgcaggtcaccgattatgcgctgaatcccgatgcattcggcgggcagccgaccatcacgctggagccgggggcctcgtatgcgctgacgtgggaactgggatggtatgcggacgaggatgcattcctggccgctacgattgctcctgcatcgttctcctcgttaagcgccactgtgggcgggcatatcgatatcgccacgaatcgtgctgttacggcgctggatgacggtcttaccgtcgaacggactgtgagcggagttcggttgacggccgaacaggcgggtacctaccaactgcagcttgtggatggagaccatcgtgcacataccgaagtactcttccacaagacgttgagggataccgtcaacgaccgtgcgcgatacatcctggagcatcaggtggcgtatgagcgcgtcggcgcgttggctggggccatcgtggctaccgatacccgcaccgggcagcatgtgctggattccagttgggatgactggtcggatggttccgagcgtatcgccatgccggtattgctacaacgtgcgctgaatcttgggctgcttgacgagtccctacgagagccggcccagcgtgccgccgatgcatggcgcacgttcgccgagtccgcgctcatcgacgccagcggcgcggtacgtcgcggctcggggctgccggaatccaaattcggaggccgtatctatgactgcccgtggattatcagtttcttcaccgaacattatctggccaccaaggatgcgcacgatctcgatatggcggtgaacatcgccgatcgggcggccgaaattggcggcgagcacttcctgagcatcgagttcgccgaatccagtgcggccttggcgcgtgtgcttaagcagaccgggcgaaccgaggagacccaacgtctgctcgatcgtgtggtggtcagtgcggactacttcctgggattgggtatcgacctgccctaccatgaggtgtcttacgaacagtccatcactgcgccgttggtgagtctgctgttggaagcgcatcgcattaccgggcgcgccgaatacctggatggtgccgtggagcgattggattggctattggcgttcagcggcccgcagccggactcgcgtctctacggtgtggcgattcgacattgggatgggtattggttcggcatcaaccgacaattcggtgatgtgttccctcattattggtccacgttgaccgccgaagtgctggcacggttgccgcaagaaaggcgctccgcacgtaccgatgatttggccaaggcgattttcgaggccaatatggcgaactatggcgcggatggttccgccacgtgtgcctatgtgtttccctccaacgtcgatgggcggtccatgcatcaggccgacccattggccaatgatcaggactggcacctcaatatctggatgcgcatgattgccgaagagggcttctctgcgctctgagcccagcggcgctctattcggggcacgccattgcagcggtggcgtgcccttttggggatgctcgaatagggaagtaggcaaggttttttcatttggtgccgtccgagcttattggctataacgtatcgaacgtgcctgtaaccgatggagaaaacgtaaggaaagaattctcggaactttgtcatctgcctgaactgacctttagcagtcggatgccaatcagctgccgtatgacgtgtcggccacgcagtcatcgcaatcgttgctctccggtgtgaggaccgccgcgactttttaagcgataccagagacataccgaggccggagccacgagatgagtaacagtttgcggtagattcccatcgctctactgcagagcatgaaccgccttatcaaaacgttcggccatcagattgatggaatgcatgtcaatgcggcgcatcgcggctcgagataatgcctgagataaggctgatcgcaatgtcggcaaccaatgatccgcatatttacggcttacaccgaacaaagacagactctcatcggacatcaatttatctatatcgacttcggtgtcacctaataatgacatctggtgtgagtcgggtagcgacggatcgaatggttcaggattcatgtcaaaagcgggtgccaattgccaggaattattcttacgcaaatacccgtggtttcgtagatggtcatcagtgttgccgatggccgcgccaaacattgctctccgccacagctctatggtgtctcctcctgccctacgcgtaaattctgctaaatccaaccagtctccgccgtccccatctcttgcttccagcgcggtcattgcggatatataaggtaatcgctccattcgctcaactgatggtgcagacacgcgatcaaaacggtgagtcaatagcacggtccggcttctctcctccgaatcctttattgcaatgacgcgatgttcgggcactttgatgccggccatgttcgcgatttccaaggtgacggcttcccagccgataacatcccaatcatcgccgttcggtttcggaaatttggccagccacagcgcattacgatccgacaccgaagctttaggtcgtgcgcctccgagtgagccggttgcccgatacaacctgcgtaaggagacatcacttacctcgcggttctgttccaccgcatccgcagtgtccaataactccggcagctttgacagtacgggtactccttcatctcctgccgctggcttgccatcaacaatgaatcgaatggcaccctgtcttgtcagatcgttgacgccgaacaaatattccgactcgctgacacgcgtccgtttaagactgcgggaaaacacctttctgccccaacggtctggggcggaatccgaaaatggaccaagtccagagaagaagaatggggccaacgagcggggcatagatgggaagaggtcgaaggaatcactgctgattgtgtacgtcgaatcatagcggaacgataggtcgtcgccagtcgcatacaatgtgccggcaggagcttccattccaggccctagcgtaatcagtacagttgattcgatagtttttgccatcagggattcacctccgaacgcgcttcgggagttgttggccagcgcggagacgcccaagatcggtggaataggggtcgcatgcggctacgagtgtgtcagcaagttgcaacacgcgcgcgatggttaacagcgaatctgaccggacagccttgccttgctccagatttgacactgtggtcgggctgacaccagagcggtgtgctacatccgcaaccgtcaacatcagtagtttgcgctgtcgcgagaactgttcgcctaggatgcgtaaatcgcgtttggtggtggtgggcacatatttcattgcgatactccgagtgttataacatatagttttccatgaataaaatcatttattcactagtatactattgattatttgctatgcgataccggaatgaggaaggtttagcgtctcgatgtttctgctcatacgcaaaaggactttctgccaacaaatagccagaaagtcctttggtctcacgtgtatatgaggtttacaatcccggaatcaaaccaccgggtgggtcgagcgtgaggtattgctcctccagatcgatgtcgggcaccagttcctccacgaacggcaccaacgcggtcttctcgaccacatcctcgcccttggaattctggccggttaccaccggctcggtcaaacgaatcttgagcagggattgggcgggggagtcgatcacatccaccactttgccgaccacttggccggcgggcagtcccagaccgttgccctcgactagacgggcctcaaggccaataagatccttgggataccattcgtcggcctcgagcatgtcctccgcatcgtcgacctcgccgtagagttcgacaccgtttagggcctcggcggcattgcggtcgtcgacgccctcaagcttgagaatccaacgatccttgaacgtgcgcgaaccctcgacgatgtactcggtctcgccatcctggctgtagagcacggagtccggctcgaagcgccactcgggatcatcggtgtacaggcgcacggtgacttcgcccttcaggccctgtgcgcggccaatacgagcgaccctcagcaactcgagctgctgagggtcgtcgtgcatgtcttgctgtgccatgctgtgaatcgttccttatcggttatcgacggacgtccatgatgtcaacgcggaccttgtggtcagacagtgcctgaatcacggtgcgaatcgcgttggcggtgcggccgccacggccgatcacacggccgatgtcttccgggttcacgcgtacgcgaagcagttcgccgcgcgcgttctcatgagacttgacggaaacatcgtcgggaaaatcaacgatgttcttgatgaggtgttccacagcttgtgcaagcatagctagcctttcgtttccgctcaggcctcagccggagcttcttcggcggcctcttcagccggggcttcctcagcggcggcagcggcttcggcttcagccttggccttggcagcagcttcggacttggcggccttcagcttctgagcctggtcctcaacggccgcgatgcgggcctcggcgtccgggccagcctcaacggtcttcagggtgccttcggcaccttcaaggcccttgtacttctgccagtcgccggtgatgttcagcagcttgaagacgggctcggacggctgagcgccgacgccgagccagtactgagcgcgatcagacttgatctggatggtcgagggctgggtgttggggttgtaggtaccgatctcctcgatgaccttgccgtcacgcttcttgcgggaatcgacgaccaccacacggtagaaggcgtagaacttcttgccctgtcgcttcagacgaatcttggttgccaaaatggctctccttgtaatgctaggtgtgcgggttctcggtttgccatgtggggcatggccgtccggaatccacgtgtcctcgcggctcggggtgtagagggcgccacgcgcgcgcgaataactggcctattatagcgcacagggccggactgggcgtggcgcactgtggttgcggtgtggtgcgcgttccccgttgcgcaacattccggggaatgtatcgcgaaaatgccggctatcgcagtgcaagcgttgcggtcagggccagatgatcagtgccctcgacctcaaacgacttcacgccggacggtttgagcccgggagtgaacagcacgtgatccagctcgatgcgcggccacttgagccagctcgggaaggtgagattcgggccggcggcttgaatcagacttgcgtccttgaatccggacttgagcaacgcgcggaagctcggatggtcggtgctcgagttgagatcgcccataacgacgacgatattgcgattgctgacggattttgcacgggcgagttctcgcagacccagaatgccggccgaccaatccgcgcagccgcgcatcggcgatttcgggtgagccgaacaaagcgtcaccgtgcgattaccggaggttttgagggtgatggcgggaacgtcggcggcggggatggagaccacgttgggcaccgctgcgctcggctcgtagcgggaatagatcacgttgaatccgccattatcggtctctttggcgtctccgaactgatggtaggggagaagttcgttgatgtcggcttcggtaagacgtgtgatgaggtcgtcggtgacttcctgcaaggccaatacgctgatattgcgttcgcgaatattgcgaatgatttcagcggcgtcggcgcgtccgtatcgacaattcatcgtcataaccgagaactggggcgagagtgtttcacgcgttgttttacagtgtccatcggagatggtttcgggcccttccttcggagtgtttgaggtacccgatgtattgctgttatggctttttgacagcgtcggcgaagttgtttcacgggctgtttcacggtgggattctttgcgtttcccggccgggtcgattgacgtaccccagtagttgatgcgctgtgagctggcaatcagcgcgaccacaataagcaacgacatcgcagtccattcatgttgccatgcggcgaccgcggccagaatcatcaaaggaacccacaacagcggcgtcagggcaatcatgtacggaagcggcatacgggcctcgagaccggcgggcagcgcgcttaaggttgtccataacagtgcgatgattgccaccgcgctgaggattgtcgtcatggaagttcctttcgaaatataaattgaaccgagatataatttggctcccctctgcgaggggagccaaattgtgagatcagcgaccgaacagtccgccaaggcctccgccgaggttcggcggcagttcagtgccaccgtcgacgttgcccatcatctgctcaaggccagcgggcagggccgggttctgtggcttcttggcgaaggcggaaccgccggtcgaaccggaggacttgccggccagcttatcgcgcaatgccttctcctcggcctcgcgcttcatcggattgccggacttgccgcccttcttcttgttcttgcccttcttcttgccgccgcccatagccgggccgccgaagccggggatgccgccgcccatgccgccacgattggacatgcgcttcatcatctttgcggcctgctcgaaacgctgcagcaaagcgttcacctgagaaaccgtcacgccggaaccataggcgatacgggcgcggcgggaaccattgataatcgacggatcgcggcgctcggccggggtcatcgagcgaataatcgcctcggtgcggtcgatttccctctcatcgaactgctcgagttccttgcggtgctgggccatgcccggaatcatgccgagcagcgacttcattgagcccagcttgcgcacctgctgcagctgatcgaggaagtcgtccaggccgaaggaaccttcggagattttctcggcggccttgcgggcctcttcctcatcgaactgcttctgcgcctgctcgatgagcgtcatgatgtcgcccatgtcgaggatacgcgaggccatgcggtccgggtggaagacctcgaagtccttcaggccctcaccgttggaggcgaacaggatcggcttgccggtcacggacgccacggacagcgcggcaccaccgcgggcgtcgccatcgagcttggagagcaccacgccggtgaagtccacgccttcgtcaaaggccttggcggtcttgacggcgtcctggccgatcatcgcgtcgatgacgaacaggatttcgttgggacgcacggcatcgcgaatgtcgcgagcctgcttcatcagctcctcgtccacgcccagacgaccggcggtatcgatgatcaccgtgtcgtagagcttctgcttggcgagttcgatggaatcgcgggccaccttcaccgggtcgccggaggtctggcccggagctgcgacggcctcgccgccatcggattggacgcccttttcgggagcatagacgggcacgccggcgcgttcgccgaccacctgcagctgcgtcaccgcgttcggacgctgcaaatcggccgccaccagcagcggcgtgtggccggaatccttgagccagtagccgagcttgccggccagcgtggttttaccggcaccctgaaggccggcgagcatgatgatcgtcggcgggttcttcgcgaagttcagcggacggtcgacgccttggccgagcacgtcggtgagctcctcgttgacgattttcaccacctgctgggcggggttgagtgcgtcggacacctcggtgcccagtgcacgctcacgcaccttgccggtgaaggaacgcaccacgtcgagcgccacgtcggcgtcgagcagcgcgcggcggatttcacggatcgtgccgtcgatatccgcctcggaaagcttgcccttgctcttcagatgcttgaacgcattcgagagtctgtctgtcaaagatgaaaaagctgccataatgggcaacagtctagccgccacgcgggaaattgcggtgttggggacgacgcttttcggggaatgtgccacgtagtagtcagggatgttgggcattcagacggcaaatgccgtgccgtccgctcgtggcgaagccaatcgagtgcttccgataccatggaaaccgtaaagaatcctgtgttttttggaatacttacgctgttttgaaaatcgctggacaccgcttatacgcagactgccgtgcgctccgaaccatgacgttcgggccaacgcagacatgccgtgcaataaggaaggcccactgatgcccacccaaaaactactcgaacgcaaagccctgatcgttggtatcgtcatcaacgtgctgcaggtcttagccggcatggccgtgttcttcatgaccggtctcaaggccatgttcctcgacttctccttcaccgcgatttccgtcctgtccggaatggtggcggtgtacctctcgtcgcgcacggtgcgaaccaccgagcgcttccccaatggcatgttcgcactggaacctatctacgcgatctgcaaggccattttcaccatgtcgttgttggtgtattcgctgattgacgtgtgccgagtagcgtacgactacttcgtgttcgggtccggcgaacgcattgaaaccggcccggtggtcatctacgagatcctgaccgtaatcgtgtgcttcagcctatacacgtattaccggcgctccaaccgatccatcggcgattccagcaccatgctcaccgccgagtgcaagagcacgttggtcgacggatcgatgtcgttcggcatcggcgtagttgccatcttcctgatgctgctaccggccggcggtccgcttgacttcctgcactacaccggcgatttcttcatcaccgtggctttggtggcattgaccatcaaggagccgttcagcgtgctcaaagaggcgttcgtggaattggtcggcggcgtgcatgacgacgatgaaaccaacgcctacgtggaggccgaggcacagcgccatctgcctgccaacaccgactacgagcagacgctgatcttcaagaccggtatgaactacaccgttgacgtgtatctgagcggcatcggcgaaaccattgatgtagctgacctcatcgaatgcaagcgctcgctggaaaaggagctcagcaagcgcctgcacatcgtggacgtggacttcgtgtttgactgattgatgggtttgaagcgactacttcagactccaagtggaaccctgcgggccgtcttcgatggcgatgccggcctcggtcagggcgtcgcgaatctgatcggccttggcgaaatccttggccttgcgagcttcggcacgggcgttgagctgttcggcgatcagtgcctccagcgctgcatgctcgggcgactcggccgtgccatcagcggcaccgccggcagcgccggcggacacccacggttcggccagcgggtccaggcccaaggtgtcgagcatggcacgcacggcgagcagcgcctcacgcacctcggccttggcggtttcggaatcggcgcggtcagccagctgtgaaagcaacgtattgccggaacggatggcggtgaagatcgcggcggttgcaccagacacattgacatcgtcattcatggcggccacgaaatcggcgggcaaatcgtcggcggagacggcagtgacttcctcgcgagaaggctgtccacccagcgccacaccggcacgctcgatgaagttcgagacgcggtcgtatgcggcctgcgcctcgaccagcgcctgatcggaccattcgagcatcgaccggtactgcacggagcccagggcgtaacgcaccacccaagcggaatgctcagccaacacgctcggcacggacaggccggtgcccagcgacttcgacatcttctcgcccttggcggtcacccatgccgaatgcatccagcgcgcagcggaggggtagccggccgcacgggtctgagccatttcgttttcgtggtgggggaagcgcagatccaagccgccgccgtgaatgtcgaagccatcgcccaggtaacggtgggacatggcggagcattcgatgtgccagccagggcggcccacgccaaacggcgtcgaccaacgggcgtcctcgggatcggtgtccttcggagccttccacagggcgaaatcacgcggatcatgcttgtcgggggaggcatcggccgggtcgaccggattgtacttgtcggcaccggtggcgtccacggacgggcccatgcggtcggccacggcggcggcctcatcgacttcggaggtctgcttctggtgagtgagttcgccgtaatgtggccaggatgccacatcgaagtacacgttgccggtgggcttgccgtccgcatccgtgaccacatagccgtgtccgttgtcgagaatgcgctgaatcaggtcgatcatgtccgacatgtggccggtggcgcgaggttccacggtgggcggcagtacgccgagtgtgttgtatgcctcggtgaattcgcgctcgtagtaataggcgcgggcccaccaacgctggcctgcggccgcggccttaacgagaatcttgtcgtcgatatcggtcacattacgcacaaaagtgactttgtagccgagcttcaaaaaccagcggcgcacgatgtcgaacgccacggcggcacggatatggccaatatgcggtgacgactgcacagtcgcgccacacacataaatgccgacttcgcccggcttgagcggcatgaaatggctgacctgatgcgaggcggtgtcatacagattcaggccttctgcggccttggcaacatgcactggcgtcaggcttgaaggcatgacggaaatgttgaaatcctgcggttcttggctgtttcccataacactcaagcgtagggtccgaaccagacatgctgaatcgttactcgaagagtttgatgaacgcttcacaggtggggcccgaacgaggtgacagacggatgagaagcgggacaacagtctcgcgagaacacgtctttgaccgctgcggaaactgcgagattcatggatttgccctgctcgttacgcaaacggggaacgctcgtgccacaatagaagtcatggccacaccacaagtgctcattttgcaacatgtcccatgggaacgcccgggacgcatattgtcgaacctcgaggacatcggtcttgagacggtgacgatgaatatcgtcgacaaaaagaaaccggacttgcctgatttcggcgaactggctggcgtggtaatcatgggtgggcctatgggcgcgcttgattacgataagtatccggggctgaaggcagaagccaagttggcgcgtgccgccgtggcttcaggcaagccgattctcggtgtatgcctggggcatcagattatcgccactgcgcttggtgcgcagctgcgcaagggcgatgcgccggagattgggttcgcgccgatcaagcgtgtggacaagcatgacttcttctccatgtgggataagcagctgacagtgctgcactggcataacgacgtggtgggcctgcccgcggaaggccagctgctgtcgcgttcgtcttccaccaaggtgcaggcattccgactgggatccgcgctgggcatgcagttccacctggaagtgtgcggctcgctgctggacgaatggctggatgagccgagcatggtcaaggatctcaaggccgcgggtggttccaagtcccaattgcgcgagcagttcgcccaatacgaccagctactgcaaccgctcgccgagcaagtgttctccggttttgcggcccgctgcaactcctacgctcagacgctgaacaaataacgtttgcgggccgccgctgggcaagcgtggcgctacattggtgagtcatgccgacttatgacattggactggaacacgtttcgctcgctttcgctaccaaaaccatcttcactgatgtaacgcagggtgtttttgaaggcgaccgcatcggcatcgtcggcaagaacggcgacggcaaatccacgttgctgcacctgttccgcggtgctcaggagccggattccggccgcgtgacaaagcgtggcggactcacgttcggcatgcttgaccagcgtgatccccttgatgacaacgccaccattcgcgaagccgcacttgaggggcgcgccgactacgaatgggcatccgataacacttcccgtgaaatcgtcgaggcattgctcggcggcatgagcctggatgccaaggtcggctccttgtccggcggccagcgtcgccgcgccgatttggcccgactgctgctcaaggattgggatattcttgcacttgacgagcccaccaaccatctcgacgtggtcactatccactggcttgccgaacatttgaagaaccgctggtccaaaggccagggcgctctgttgctcgtgacccacgatcgctggttcttggacgaggtctgcgaatcgatgtgggaagtccacgatggcgtgatcgagccgttcgagggcggctattccgcatatatgctgcagcgcgtggaacgcgatcgccaagccgatgtgcgcgaaaccaagcgccgcaatctggctcgcaaggagctcgcatggctttcccgcggtgctcgtgcccgctccaccaagcagaagttccacgtcaaggccgcacgcgaattgattgccgatgtaccgccgatgcgtaacacacttgaactgaagcaaatggccacctcccgtctcggcaaacaggtggtcgatttggtcgacgtgacgcagattttcgaaaaaccgcagggcatggccgatatcgacccggatgtggcggcgctctccgcgtccgcttcccgcgtggatgtggtcaacgccatgtacgccgagccgcagctgcatggttccgttgaggtggcggtcaccgacatgactgacccgcgcctggtggacgccggcgtgccggaagccgtcgagtccgctgaggaagcgcgtaagaaggccgaggctgagagcggcaatccgcagcttgctgacgatcgcgaggttcgtcgcatgaacacgggtggtgaaaccatcggcggtggcactgctgcaacggattcggatgatgacactgctgcagccggtgtcacctcggctgcacgcaaggtgacggtttccggccgcgagattcttgacgatgtgacttggctgattggcccgggcgaccgcttcggcatcgtcggtgcgaatggtgccggcaagtccacgctgcttaagttgattgatggcacactcaccccgaccgcaggccatgtgaacattggcaagacggtgaagttcgcggtgctctcgcagcgtcttgatgagctggagaaactgggccagtacaagatcaaggaagtgctttcccgctataagccgagctacattgtggatggcaaggaagtaacgccgggacagttgatggagcgtctcggctttgaatccgcccagttgatgacgccgattcgcgacctctccggcggacagaagcgccgcatgcagttgctgctcatcctgctcgacgagccgaacgtgctcatcatggacgagcccggcaacgatctggacactgatatgctcgccgtcatggaggatttgctcgatacttggccgggtacgttgattgtcgtatcccacgaccggtacctgctggagcgcgtcaccgatcagcagtttgccctgctcggcggcaaggtacgccatctgcccggtggtgtgcaggactacctcgatatggttgaggctattaagaacggcaagggattgccggctgacacgcctggcttcgcgggcaccggtagcagctcggcgaagtctggtaagggtaaggcggccgccgtcaacgctgccgcatctctccctcagtccgcttcgcggatagctccctcgtcagagggagccaataacggtgaggactccacctcgaagctcaccggcaaggccttccacgaggcatccaagcgcgtgaatgccatcgaacgtaagctcgctaagcttgaagagcagaaggccgatctcgaggcgcagatggccgcccatgacccgagcgactacgagggtctcaacaagctcaatgaacaactcaccgccgtcaatactgaaagcgatgatctcgaagccgaatggctcgaactctccgaacaattggagtagcgggagaaaccgtaacgttcacaaggcctcggcagtttgccgggacctcccgctatgcaaactcccacggattaatcaattccacgtcggtaccttcgaagtccttgatattgcgcgtggctatggccgcatcccaggaacaggcaattgccgcaatcatggcgtcttgaatactggtaggtgtgcccctgtgttcgcgttcgacaaggatatgggcataatccgcagctgcctgagtgtcaaatgcgaacgttctgtcctctaatgtcataagcgccagcttgacggtcgtatctgtgtactttcgtcgtttgccttcaggcatgcgacatattccggccaacaactcggcgacggtgatggcggtggttgccaaattgcttgtatcttggttcctcagccaattggcaacgtgttcgtctggctgtttcttgatgatttcgctgatgacgttggtgtccagaataatcatggccgattcctattcaaaagatactggcggtcgggaatcggcggaatttcgctcggatagtgggagttcccccttgtcgagtccctcaaaatccatgttcttcatgaattcgcggatctcgtcatagaaattggtctttcgcgtgatttcatgcgccaccgtgccagccagccattcttcaagaatggatcgcacctgagattccatggagcggttgtttttctcagccacttctttgagctgctgaatctgctcatcgggtatttttcggatggtcaatgttgccatgatgcacctccttgttgctgtcataatgctagcatgaggtgctgtcgttttgcttgcagtacgggtgatgaggtatgcacgcatgaaaaaaggcggatatgcatcatgcgcatccgccttttgagcttggactgggtcttcccgcagtcgccgaatcagcgcccggtaacctcggaaccgacgaccttttcgctcagggcgcgcgggccgcgggtcacggctacggcaccggagcgcaccagctcaatcacaccgtaatgctccaaaagccccagcagggcgtcgatcttgccttcggcaccggtggcctcaatggtcagcgattccggattcacgtccaccacgcgcacgcggaacagacgcacgatctccagcacgtcggaacggttggattcgttggcggccaccttgatgagcaccagttcgcgttccacggtggagttcgggtcgagttccacgattttgagcacatgcagcagcttgttgagctgcttgatgatctgctccagcggcacggcctccacgtcggcggtcaccgtgacgcgagagatgtccggacgctcggtgggggagacggacagcgagttgatgttgaacgcacggcgggcgaacaggccggcgatacgcgccagcacgcctgggcggttctccaccagcacggacagcgtatgacgctgggaaccaggctgggatgcaggatagttagccatgagtgttctcctctcctcagtgctcgctcgcagtggcagcggcggtctcgtgctcgaacacgccggtcgcatgctcgtccggaccggttcccggagccggggtgccgccagccagcggcttgatgccgggcttgtacgtcacctcgtcgttgggggcgccggcggctaccatcggccacaccatcgcatccttccacacgcggaagtcgatcagcaccgggcggtcgttgatctggttcgccttttcgatggcggcaatcgcctcttcctcggtgaacgcgcggatacccacgcagccgtatgcctcggccaacttgatgaaatcaggcacttcgagcggcgcatcgccgtcggccagtgccgccgcaccatcggcaccgtgcgcttcaccatcgagcaggttggtctgcgagtagtggtgctcgtagaacagcgtctgccactgacggaccatgccgtatacggagttgttcagaatcgcgatcttcaccggagcgtggtccaggaacgcggcggccagctcctcagaggtcatctggaaggaaccgtcaccatcgatcagccacaccggcttcttgccctcgaattcacgggccgagcccacggatgcgccgatggcagccggcagaccgtagcccatcgtgccgaggcctccggaggagatccaagcgtgctggttctcaaaatcgatgaactgcgaagcccacatctggtgctggcccacaccggtcacccagatggtggacggatcggccatctcagagagcttcttgatgacccactgcggggccagcgatccgtcggtcggctcatcccacgtcatcgggtattcctcgcgccagccgtcgatcgccttccaccagggggccagattcggcttgccctgaatggcctgcgtacgctgaatctcgggaatcaagtcgtcgagcacggtagccacatcgcccacgatcggcacgtcgggctgacggttcttgccgatttcagccgggtcgatgtcaatgtgaatcacgcgggcggtcggtgcgaaggcgtcgagcttgccggtcacgcggtcgtcgaaacgtgcaccgatggccacaagcaggtcagcgcgctgcacggcgccggttgcggcaatcgtaccgtgcatgcctagcatgccgaggttcttcgggtcggagtcgggaatgatgccgcgtgcgggcagggtcgtgaccacgggagcgccggtcaggtcggccagagccttgacctgtgcgccggcgttggagcgggcggcgccgccacccacatacagcaccgggcggtacgactgagagaacagcttcgccgcgtcggacagcacacggccgtgcgccttggtggtggggttgtagccgggcagaatcatgcgctgcggccatgagtagtacatgtcgccggtctgtgcggtcttggtcagatccacgaccaccgggccggggcggccggtgttggcgatgtagtacgcctcggaaagcacgcgaggaatgtcctgcgcgcgggtcacgaggaaggagtgcttggacaccgggtaggtgatgcccacgatatccgcctcctggaaggcatcagtgccgatggcttgcacgcccacctgaccggtaatcacgaccatgggcacggagtccatgttcgcgtccgcaatggccgtgaccacgtttgtggcacccgggccggaagtcacgatgcacacgcccaccttgccagtggccagtgcgtagccttcggcggcgtggccggcggcctgctcgtggcgcataagcacgaagcggaacttcgtgttgtctttgatctcgtggtagacgggcagaatcgcgccgccaggaatgccgaagacgtcctcgacgccgaggtcctccagcgaacgaatcagcgcctgggcgccagtcatcttctcgccatcgacgatggtctgcttatcgggggccgtgttgattttcggtacaccgctgaatgcctgcaaaggcgtgggtaaagccatgattcctctcacctcataggttttgtcgcgaacctgcccgaccttgggatggggccgggtgcccgcgtgtctgattccagtcgcttccccgagacttgtggccccggcgcgactcgtcgctcatgttggtattagtctattcgcaaatccgacagcgggcttacttagtccgcgtcttgaacgagtccagtgacttccagcccgcttcggcggccgccagctgcgccttacgcttgctggagcccttaccgatgccgatgatgtcgccgttctcgcccaatgagacgcgcgcggtgaagatctgcgcgtattccgggccggagacctccatatggtagacaggctcctccttgccgaggccgtgcgccttgacggtcagcgaggtcttccagtcaagtgccgggccctcggtggccacttcggcgagcgtgtcgtcaataagccggtgaatcaccttgcgtgcctcgtcgatgccgtgttccaggaaggtcgcgccgatgagcgattccacgatgtcgcataggatggagttcttctccgcgccgccctgctcggcttctccgtgacctagcagaatgtaggggcccaccttgagcttggttttggcgatggcgctcagcgcgtcttcggagacggccttggcgcgcatcttggccagttgcccctcggtcatatccgggtgaatggtgaacagcgtttcagtggagaccagttcgagcaccgcgtctcccaggaattcgaggcgttcgtaattggccacgccggggtgctcatgcgagaaggaacggtgggtgagtgcctgcacgagcagatccgggctgagagtggtgcccaacgcttcaagaagctcgttggccggcgtcggctgctgtggggtttcattactcatgattgttgtatggtccttcacgcgatggtgatgtgttgtgttgtgttgtgttgtttgcgatgcgatggtgtacgcaatggtgcacttatgcgaagaccccgccacccgtcgatggcagggccttcattcaagccgttatcgcaggactcacttggtgtgagccggctggatggcggagcggtaggtgcggccgcggtagttaccgcagctcgggcaagccatgtgcggcagggccggagcgccacagttcgggcagttcacggtcgcagcagcggtggccttccagttcgcgcgacgcgaatgcgtgttggcgcgcgaggtcttgtacttaggcagtgccatttgagtatcctctatttcgttcgaacaattgagcttaagcgtccgttatcttaacgcacggctcgtacaaacttcgttcaggcgcgcgtcactcggcctgctcgccgttctgctcggcctcgagctgggctttgagccccgccaatccggcaaaacggatatccgtcacatcgtgatgatggtcgggatcctcgttcagatcggcaccgcactgcgagcacagacccctgcaatccggtcggcacagtggttgcaacggcagcgattcgaccagcgtgtcgcggatcatcgcctcgatgtccgcgaatgcgccgttctccagcagcggatacgtgtcttccgactcgtcctcgccggcgatgatgtcgatttcgtcgtccttcttgctcttgccgcccttgccgttggccttgtcctgacccgactcgtatgggaagaacaccgtcacatcaaccggccagtcctcgtcaatcggcttcaggcagcgcgtgcactcgctgacgaatggcgcgaccaggcggccggtgaagatcaggccgtccacaatcgaatcgaactgcccgctcacgtgtacgggctcaccttccttgattccgacaatgctgtcgccaatgccggaaggtgccgggaaatcggcgtcaatcggcttggattgaccggcgcgcgaagcaatctgcgctaccggaatggcccacggggaatcttcaactcgtgccatggtatgttcttggtgcctttcgtatgttggctggagttattcgttactggcgttattcgcgttactgatgttgccggcgttgctggcgttactgggcttcgggatagtcgttcagcgtcaggtgcggcatctgttcgcgggccgcgcgctggcgctcttccagcacgttaagaccggcctgcacatcctgactgagtttgccgagctgctgggacagcccttccatcaccgtagtgcagtactggtccgcgccttgggtcagatggtcggctttggtctgtgcctggtcaagaatcgcgcgcgctttctgccgtgcaagctcggtgacgttctcttggccggccaggaactgtgcctgttcgttggcgtccttgaccatgttggctgcgcggctttgtgcggaggcgacgatggcgttggactgggtctgtgccgattccagacggcgctcggcctcgcgcatgagggcggaggcgcgctccaactgcaccggcagcattttcttcaactcggaaagctggtcggtgaattcgtcgcggtcaaccttcaccatgccgggggcgaatatgctggacttcgcttcgcccagtgccgcctcgagctggtcgatgatgtcatacaccgtggtgaattcctcgcggctcttgaccgtggccgggtcgtcgtccgtggtttctcgcaggtcgggcatttcgttcatgaacgagggacgaatgccggcggcctgagcggtctgagcctgtgcccgggtctgctgagctgcttgggcctgcgctttggcctgcatttgtgccggagtaggggtaggcgcggcgggcggcgatccggcgagaacatcggcctcttcggtgggtgccggcgcggcttgcgtagacgcgggcggttccggggcggacggctccggagtggacgatgcggcgtccgcattcggtttggtcagatcgacgtatccagtggggtggtcatcgctcatagtcattagtgcatcagtccttccgctgacgttcctcggccagggcatcggccagcatcggcacgacgcaatcgggcaccatgccggtcacgtcgcctccatggcgggccacgtccttgacgatggaactggagatgtgttcaagaatcggatcggccggcaaaaacagggtttcgatgccagcgagcttgcgattgaccagcgccatgccgagctcggcttcatagtcgccgttctggcgcagacccttgatgataacggtggcgccgaccttcttgcagtagtcggtgatcaggccgtcggtggaagaaacggtgacgttcttgcaaccggctttgtcaagggcgcggcggatcacgtcgactctggtggcttcggaaaacatcggtgttttcgcggcgttgacggccaccaccacatgcacctcgtcgaaaaaccgcgccgagcgctcgattacatccaagtgtccggcggtaacggggtcatacgagccggggcatactgcgatagtcatgctttatagcctaccgctagtggtgtgcttcgtgctgccgagcgtgcattgttgtcgcgtcggcgtatgaggcagtgcgtgcggtgccgtatgtggcgtcggtgtggcgtcgtgtgcggcattgtatgtggcattgtatgcggcggggtggcgtgatgcgcgacatgggtgtgtggaggtgtgcggattacgcgccactgggtttcgcgggtaacgacgggaatctatgatggagtgcagtcgaatcgttgaatgcgaggaaagaagtgcaccatgacttttgccgagatgttcgttgatgatgccgaaccgctgcgcaacccggaccaaggtgccggcacgtcggtgctggagcgtccggagaccaaggagtcgccggttcgtgacgatggtggcgacgccgatcgttttgcgcactacgtatccaaggaccgtatcgctgaatcgcgtgcgaccggtcgtccggtggtcgccctgtgcggtaaggtttgggtccccaagcacgacccgtccaagtacccggtttgccccgactgcaagcggatttatgaggaaatgacgcgctaaaggtggtacttggctcccctcagcgaggggagccaaaatggtcaccgagccgaaatctcgtcgatgagcttgagctcctcgtcgctgaagtgggtgttcttcagcgcgccgatgttgtcgagaatctgctgcggcttggaggctccggtcagcacggaggtcaccttgccgtcgtgcagcagccatgccaggctcatctcggccagcgtctggccgcgttcggcggccagattgttcagatccatgacctgctcgtgcagtttctcggtcagagcggaatcgttgaggaatcgcgggtcgtgagccatgcggctgtcggccggaatgccgttgagatagcggttggtcagcaggccctgagccagcgggcagaaggtgataaggcctttgcccagcttgaaggcggtctctttcaggccgttcttttcaacggtgcggtcgaggatgttgtacttgttctggttgatgatgaacggcacgtgcagttctgccagaattgcggcggccttttccatcgtcggaccatcgtagttggacagacccacgtacagggccttgccggagttcacggcctgagccagcgcgcccatcgtctcctcaagcggggtttccggatccgggtggtggtggtagaagatgtccacataatccaagcccaagcgttccagcgactggtcgaggctggcgagcaggtacttgcggctgccgaggtcgccataggggcctgtccacatttcgtagccggccttggtggagatgacgagttcgtcgcggtgatgcttgaagtacttggcgagcagcagtccgcagttcttctctgcctggccgggctcggggccgtagttgttggctaggtcgaagtgggtgatgccgttgtcgaaggcggtgaagaccagggacttcatctggtcgaatggcgtgatgtcgccgaagttgtgccagaagccaagtgagacggccggcaacttgaggccggaggtgccggcacggttgtaggtcatcgtgtcgtaacggtgcgggttgggggcatagatggcggttggctcgaacattgagtctccttacaatgtcattcttgttcttacgaatgcttacctgcgatgggcagaccgacgccgattgagcggtattcgtaagtgttcttggatactatggttccagttcaagtgaacttgaatgcaaacggctgcgatgcttcggcgtgttgccgcagtaaggagtcatgatgtcctacaccattcgtcaggtggccacgcagttccatatgcagccctctacgctgcgctattacgaggatcagggattgctgaccaacgtggagcgcaccgaaaccggccagcgcatatacgaagactgccatatcgaccgtctgcgcgcgatttgctgcttcaagaacgccggcatgaccattgacgatcttaaaaagttcttcgtgtatgagtccaatgagcccgagcatatcgatgaaatccttgatctgctggaatctcgccgcgaatccttggacgagcagcgccgagccctcaacgaggcggccatgcacgtgcagcgcaagctccattactatggcgacatcaagcgtgccatcgacgccggtgaagactggccggattggcgcgagtacaaaaaccgcgcctattccattgaatgctgagaccatcgaatgctgaaaccatcgagtgctgagctggatgccggctgggcactaagaccgatgcgcgtcgatcgtgggcgcgtctatccgagtaaggccttgctcggcagtgcgcggtcgagcagccagacaacgagcgatatcacgaagaacgctatggccagcttgccgcagctaatgccgaacccttgccagccgagtgcgtcgaggttgatgaagtcgtacggatacggactgccgccggccgccggtccggaccccggccaaatcgccgcacgggccagcacgaagaccaagtatgcagggaagtacgccagccacgagaacatgtaatgccagcggaaacgccggtgcgggtcgaatagcacgaaatcgataaccgccataatcggggcgattttgtgcagcatcgtattggtcatgatgccaataacctgtggcacgtatgccgggtcgtccggaggcatcaggaagaacgccaccagtgcggtgactatggcgtacacagtcaggcaccccttaagccatgcaggcggctgaatacctttgagcagtgtggccgcgccggaccacagcatcacgatgcccagcacgaaaccggtctggaacgtgaaatacacccagaactgcggtttggaccatgcctcatatgtgcccacgaagcagaaaccggcgatcgcaaagcgccacaacgccacgatgaatctcatgcatcgagtctaccgcttcgccagtgggccgtatggtgcggctggcgtattggctggtcgtgatgattatggtcggtgtgaccgaccgccatagtgccgatggatatgacgatactgaacccggcaatatcgaatctggcgatacgagaataagacgagcccttcccgcacggctttgcccggactacacttaggtgcaacttcaccacttatgtaggaaaggccttgcaatggtcgattattcgccggctctgatgaccgacatgtatgaatacacgatgctcgacgccgctctgaaagacggtaccgccgaccgcaagtgcgtgttcgaggtgttcacgcgtcacttgcccgaaggccgtcgctatggcgtggtggccggcaccggccgcattctggatgcgctggaacatttccacttggatgaagcggacctgaagttcctggccgaccgtcacgtggtaagccccgagaccattaagtggctggagaacttccacttctccggtacgattcgcggttaccgcgaaggtgagatgttcttcccgaactccccgattttgcaggtcgaaggcacgttcggcgaatgcacgctactggagacgttgattctatccgtgctgaactacgattccgcagtggcctccgccgcctcacgtatggcgtcggcagccaaggatcgtccttgcatggatatgggcggacgccgcactaacgagtgggccgccgtggccgccgctcgagccgccgtagtgggcggattcaagggtaccgccaatctgctggccgcccagctgtatggtctgaaggccattggcaccgccgcgcattgcttcacgttggtgcatgattccgagcgtgacgccttcgaatcgcagatcgaggcattgggcaagaacaccacgctgctggtggacacctacaacatcgaggaagccgtgaaaaccgccgtcgaggtggccggtcccgaactgggtggcgtgcgcatcgactccggcgacctagccgccatggcccagcgtgtgcgcaaccagctggacgccctgggcgccacgaacaccaccattaccgtgaccaatgatttggatgagtacgcgctcgccgcattgcagaccgcgccggtcgactcctatggtgtgggcaccatgctggtcaccggctccggcgctcccacttgtgcgatggtgtacaagctcaccgaacgtgaaggcgctgacggcacgatggttccggtcatgaagaaatccaaggacaaggccacagtgcccggtcgcaaactggcattccgctcctacgaatacgcgttagccgaagccgaacacgtgatttccggctcggaggagaagctggccggtttcacgcctgaaccgacgtggaagaacctgctggtcgactttgtggatcatgggcagatcgacgctcagtggcagggccatgacgccatcatggccgcccacgactaccacgccaaggcgttgtccgaactgcccatcaccgcgcagagcctcatgaagggcgagccagtgattcctacggagactcaggttctctgacgagaactttcgtctccataggaatccgtcgcagcatagctgctccccttacctacggacagcccactgggctgtccgcttaacggttcgaccacagagaccaaagtcctctggccgtatctcactggccgcatccctctggttacattggctactcttccctctggatgagtgaaactctcaatggtgataacgcggcgggcaacgatgacgtatcagagcggcgcgatgtagttcgatgatggttgacgagttgctatccaggcatagagcggatggcgtatgctggggcgcatggttgaaatcaaagacatgcttggcaatcaccaaataattcgtgccgacggccgcaaggtcgacgaactgcgccctgtgcgcatcacccgccacttcaccgacgcccccgaaggctccgtgctcatcgaatgcggtaacacgcgcgtgatgtgcaccgccacttttactcccggtgtgccgcgttggcgcaaggactccggcctcggctgggtcaccgccgaatactcgatgctgccgcgtgccaccgccgaacgcaccgaccgtgaatccgtacgtggcaaaatcggtggccgtacccacgaaatcagccgactgattggccgctgcctgcgtggcgtcatcgatatgaaggcgctcggcgagaatcagattcagcttgactgcgatgtgcttcaggccgatggtggtactcgcacggcttccgtaaccggtgcgtacgtggctttggtcgacgcagtcaattgggcggagaagcaccgccatatcaagtccgccagccgcgtgcttaaggactatgtgtccgccgtatcggtgggcgtgatcaacggcactccgatgcttgacctgccatacattgaagacagtcaggccatgaccgacatgaacgtggccatgaccggttccggcaccttcatcgagattcagggcaccgcagaacaccgtccgttcaaccgtgccgaactcggcaccctgcttgacttggccgaaaagggcaacaaggaactgcaagccgcccagcgtgccgctctgtccctagactaagccagctcccctgacaaggggagccttcttaaaggagaacctcatgcaaatcgtcgtcgcaacccataacgaaggcaagcttgtggaaatccgccgcattctcgaagaggatcttggcgcggatgccgaaaacatcgaactggtgtccgctggcagccttcacctgccggatccggtggaaactggcgtcaccttccaggagaacgcgctactcaaggcccgcgctgtggccatccgtaccggtctgcccgctgtcgcggatgattcaggtctcatcgtcgatgtgatgggtaacgctccgggcattctgtctgctcgctgggcgggtgctcacggccacgacaaggccaataatgcgctgctgctcgcccaaatcgaagatattccggatgacaagcgtaccgcgcgcttccgttgcgccgccgcgctggtggtcccggacaccgagaccggtgccgacgtgaccggtggagtggctgccgacggcatcaccgttcacaccacggctgccgatgggagccctgccccggtgcatgctcgatacgccatcaagtcggagacagtggagctcggcgacatgccgggtcgcatcatccgcgaggctcgtggcgtacacggtttcggttacgatccgctgtttgtcccggacgatcagcctgccggtcgcgtcagcactgagcctgaccatgaaggcgagccgctgaccagcgccgagatgactccggccgagaagaatgcgatttcccaccgaggcaaggcgctgaaagccttggtccccgccatcgaggccctgctgcactaagtcgtctaggctgtctagctgcactgagccgcgactaagccacagttgagtcgcggctcagcactcagcccccgaatcgggcgagtgtctagcaagcgcctatgacctagcaagggcgatacgaaagaaggccggcgcttagtgcgtcggccttcttgatgaacaagagccacccgatagaatcgaactaccgaccttcccacgaacgagggggatgctctaccactgagctaaggtggcgtggcttcaagagccaagtagagaatatagcactgcgtttgattcactgcaagccggacattcatcatctttgggccattgttctttggaccatcgtggcggcaatagtgcgaacgatgtgcacacctcatctgctcggccgccattcgtcgtgtgcgcgctatgctagcatggtgagcctgattgactcggaggcaaagggaagcatgcgtgattttgtgctggtgaagttgacagacgaggagttcgatgatttctccgccaggcatccacaaggcaatttccaacaaacctcggcgatgggacgccttcgcgccgcgcaggggatcgacgtcgaatatttggccctcaaggagggcgagaagatcgtcgcggcggcactgttcgaaactcaccgctctcgattctctacatttgcggtcatccatgatggcccgatgtgcgactatcacgacaccgaagcattgaccttcttcatggatgcgctgaaacgccatgccaaggcaaagggtgcttcacagctggaaatcacccctgaatccccgtatcggcttcgcgacaccaatggagcttctttgccggatgaccagaatggcgctcccgacaataagctgatagaacagctcgaggcgatcggcttcactcatggcggtttcaccgtgggctacacggcggttccgcgttggcgctacctcaaggatctgaccggcattaccgatgagaaaagtctgctgaagtcctatgacaagcgcacccagtggagcgtgaagcgtgcccaatcgatgggtgtgcacgtgcgtgagctgtcggacgacgagctgggggtattcgcacgaatcgagcagcaaaccgctgaacgccgtagcttcgaataccgtggcgaagcatatttccaccgtttcaaggaagcgttcggcagcaaagcgcattttatggttgccgagatccacatcgacgaatacgtagcagacatgacgtccaagcgtgaagcgctttcggccaaggtggcggcattgaccgccaaaaacgccgaacaccccaccaccaaaaccgaacgtcagctgggggaggagacccgcaatctggcggcagccgaaaagcgcctgaacgaggcggccgagttcgccaaagacggggatgtactgccggctgcggcatcactattcgtggagcatccgcgcgaggtcatctacctgttctccggtagcgtcgagcagtacaagcccttctacgcctccgcgctgattcagcatgacgcgatgctgcatttctgcgtggaacacgggctgtctcgctacaacttctacggcatcgacggcgtttttgatgatcccgatgacgaggggcgtggcgtactggagttcaagcagggcttcaacggatatgtcgaggaacttccgggcgagttcgtgctgccggtcaaaccggtcgcctatgccatgaagcaatttgcgcacaagctgctgtcgcggtaaacggacgcagcacacaggccattccagagcccagagtaacgatcagagtaacgacaagtaagaaggttcgattatgacgcaatccgatgcaggcgtcgcctcgctcacccctaccaagatcactcctgccgagctggatgcgttctccgcagctcaagtgcaaggtagtttccagcagacctcgcagatggccgccatgggtgcgttcaacggtccggtggactatgtgggtgtcaagcgcggtgacaagctgattgccgcctgctacgtggtgtacacgcggtcccgtttcggtttggaaggctcggtctggtgcggaccgctgtgcgattatgacaatccacaggtggttgaggcgatgaccgaagccctgcgtcgttcggccaaggcccatcacgccatcagcgtatcctgctggccggccgcagtctaccgtctgcatgatctggacggcaagccgaccagcgacccggacaccacgatgatggacaacatggcccgcttcggttggaaacatggcggtttcaccgtgggctacgaatccgtggtgaaccgctggaacttcgtcaaggggcttgacggcattcataatgagaaggaactgctggcctcgttctccaagtaccgccgtaagaacatccgcattgcccaggattccggtctgcgcgtgcgccgactggaacgcggcgaactgagcactttcgtcaagctgtgcgatatgagcgccgcacgtcaaggcttcaagagccgcgatctggcctactatgagcgtctgttcgataccttcggcgacctgatcgagttcaaggtggtcgaaacccatttcgacgaatatctggacaccctgcaatccaagctgaatgcggcctccaaagacaagcgcaacctcgaacgcctgctccagcgcgcgcaacagcagccggaaggcacggccaagaagggtgcttccgacccggcaacgctggaaaagcgcatcgccaccgcagacaagaagattgcggcgctggaaaagaccatcggcgaagtcaatggcatcatcgcctcggacggcccggtcattccggtggaagccggcgtctacttctggcatccgaacgaggtcgtctgcctgtccagcggcgaggacgatcgtttcatggattactacccgtcttccctaatccacttcgaggcgatgcttgactgcatcgcccgtggcgtggagcgcttcaacttctacggcatttccggtattttcgacgccaacgatccttcctacggcgtctggcagttcaagactcgcttcggtggattcgtggaagagcttccgggcaagttcacgctgccggtggacggactgcgcttcggtgtatccgaagcagcacacaagctgctgcatcgctgacaaacagtggcgagcacggacacagaaataaggcacaggtgacgacgagatgagcgcgactgcgaatcgaacagatacgacgtatacgtttggcgtgattacgcccgaagagctcgaccggctttccgaagccacaagccagggcagcttccagcaatggtccgggcaggtccgtcttgccaagattcgtgggcatgaagccgaatgcgttggcgtgtgcgacgcatccggcaatctggtaaccggctgcgtaattctgtacctcaatggtcgtttcggtgcagatggctccgtatatttcggccccatcggcattagcgatgatccggctctgctgcgggccataaccgaggcgattcgcgaatcagcccgtcgccaccatgctgtttccgtagcatgctggcctaacgtcgcctaccgtctgtattcctcgaacgggcagcccgacggcgagccgaacgatgcactactggccggattcgccgatgccggctggacgcatggcggattccataccggttatgacgtggtctgccagtggatgtacgtcaaggatctcaccggcatcaccaacggcaaggaactgctggcgtcattcggcaaacgtgctcagtggagtgtcaagcgggcgcagtcgatgggtgtgcacgttcgcgaaatcggccccgacgagttcgacgtgttcgccgatatcgaacggcggaccggtgaacgccgtgggttcgcgacgcgtggcgcagactatttccgccagttcaagcaggcgtatggcgcagatgcgcatttcatgctcgcggaaatccacatcgccgaatatgtggcggatatgaccgccaagcgcgaggcgttgcaggccaaggtagctcgattgcaggcgaaatacgatgaacgtccgaccacgcgtatcgaacgtcagctgggggaggaatcacgcaatctcgcggccgccgacaagcgtctggctgaggtggagggatacgccaggaagggcgatgtgctgccggcagcggcttcaatgttcgtcagtcaccccaatgaggtggtctatcagtattccggttcgttggaggagtataagccgttctacgcctcggcgctgattcagtacgaagcaatgctgcatctgtgtgtggagaagggcgtgccccgctacaacttctacggcatttccggcgtgttcgacgatccggacgacgagggccgcggcgtgctggaattcaagcagggctttaacggctacgtcgagcagatggtaggcaaattcacgttgccggtggataagttccgcttcggcgtgagcaatctggcgcacaagctgctgcgccggtagcagctgcggtcggggggacgagcctatgtgggctgcgtctcgtctgaccgtgcacccgccgtgtgcctacttgcgcatttgctcacacgcccatcagcgcgtgagccacagccatcatccccagtgaaatcatcgcggtgattgccagcgagaagccggccagtttggcgttgccgagtactttgtcggtgaacagcgtggagaaaatggcgatcggagccaacgcgcagatcaccatcacggcgcgaatcgaagccgagaacggcagcaggaaccacgcgatcaacgcgaaggcgacgctgaacggtatacgccaagcgatgacggccatgacttccttcacgtcatgcttggattggggcaggtccatgagcatgcccaccatcagcatcgacaccagcgcgttggcgccgctcaatggctgggttatagaggcgatccaatcggaaatcttcacgttggcgacggtcaacacgatcatgagcagatacgtgtcgaacggcaccgagccgaagaagctcttgccgatggtgcgcagcaatgcgcggcgggcaagccgtttggcgtcgcgatccttgggcttttcgtacggtagggtgggagccgaaccggcgtgttgttcggcaagtgttttgccgggctgaatatgcagcagttgctgggtgagcacattggtgccggcggccaccatcacgcagttgccgatatcgaacatcgcagccggcaccaccgcgcccgcaccccagaatgactggacgaccgggaaagaaaaacagccgagattgaagccggcaccgttgagcatcaggaaggcgcggtcggtcacattgcgcttgcgggtggccagaaagatgaacacgaccgggataaaagcaaacaggaatgcgaataccgaaataagcagcagcgagatgtcatgcggattggtggcgaacgagtatacgatggcaccgggcagcacgatgttgaattccgcggtttgcagcacgcgataatccttctgcccgaacaggccgaaccgcttgaacagatagccggcgaggatgatcagcaacagaccaaccggcgtaagaatggcggacatacacttctctccttgactcacacaggctcatggcgcacaggctcagacccgcaatgctgtggcccattatatttgccgccttggcattgccatatgtagaggtgtccgcaagggcttgcagctgccgcgcgcatatacgaaaagcctcccggaagcgttggcaatccaatgcttccaagaggctcaagccggtgcgcgagatgggacttgaacccacacgtcaaagacacaggaacctaaatcctgcgcgtctaccaattccgccactcgcgcgtgcatatccgcgtttccacaggtgtgggagatatgcaaaaccctaggccggacagccattacagaccgaccagcctagggcatccgagccacttgtcagaatcgaactgacgacctgctcattacgagtgagccgctctaccgactgagctaaagtggcttggttcgcggaaggcatttcgccagccgcgcacaagaaattaagtataagacatcccagcgaaaagtccaatcggcggattggcggttgtgtcgcgaccgctcagtcgaagatgacggttgcgccgcgccacgaactgttcgataatgcaaacgatggcaatccgacatcgctgactcattttgttctgttcatgtccgaatttgtgagtattctgtttggtgatacggagcgcatccgagccgtgtgcaagggcgctccagtcactgatgaaaggaatggaatcctatggccatcaatccgcccgttgacgccacccagacccctgagtgggctgccctgcagaagcactatgacgagcttcaggtcgaaggcgtgagcctcaagaagtggttcgccgaggacgccgagcgcgtcgagaagctgtccttcgacgccggcgacctgcacttcgatctgtccaagaacctgatcaagccggaaaccctccagctgttcgccaaccttgccaaggccgtcaagctcgatgagcgcaccaaggctatgtacaccggcgtgcacatcaacaacaccgaagaccgcgccgtgctgcacaccgcgctgcgccgcccggtcgaagacgagggcaagtacatcgttgacggtcaggacaccgtcaaggacgtgcgcgagacactcgacaagatctacgctttcgctgacgacgtgcgttccggcaagtggaccggtgtgaccggccgcaagatcgagaccgtggtcaacatcggcatcggcggctccgacctgggccccgtcatggtgtacgaagctctgaagccgtacgctgacgctggcatctccgcccgctacatctccaacatcgacccgaacgacctggccgagaagaccaagggcctcgacccggagaccaccctgttcatcatcgtctccaagaccttcaccaccctggagaccctgaccaacgctcgcgaagcccgcacctggctgctcgaagagctcaaggccaagggcgccatcgacggctccgacgagaagaacgccgaagccatcaagaagcacttcgtcgccgtctccaccaacctggagaaggtcgccgaattcggcatcgacccgaacaacgcgttcggcttctggaactgggtcggcggccgttactccgtcgactccgccgtcggcacctctctggccgtcgtcttcggcccggcccgcttcgaggagttcctgcacggcttccacgagatcgacgaatacttcgccaacaccccgttcgagaagaacgtcgtggtgctgctcggtatgctgaacgtctggtaccgcaacttcttcaaggtcgcctcccacgccgtgctgccgtacgaccagtacctgcaccgcttcccggcctacctgcagcagctgaccatggaatccaacggcaagtccgtgcgttgggacggcacccccgtcacctccgagaccggcgagatcttctggggcgagccgggcaccaacggccagcacgccttctaccagctgatccaccagggcacccagctcatcccggccgacttcatcgcgttcgtcaacaccccgaacccgaccaaggacggcgaccaggacgtgcacgagctgttcctgggcaactacttcgcccagaccaaggccctggcgttcggtaagaccgctgacgaagttcgcgccgagggtactccggaggagatcgtcccggcccgcgtgttcaccggcaaccgtccgaccacctccatcttcggcgtggccctgaccccgttcgcagtcggcgagctcatcgccctgtacgagcacatcaccttcgtcgaaggcaccgtctggggcctcgactcctacgatcagtggggcgtcgagctcggcaagcagcttgccaagcagatcaccccggccatctcccaggacgacgacgccctcgccgcccaggacgcctccacccagagcctgatcaagttctaccgcaagaaccgcgagttctgattcgctttgctcggtcagaattcgtgattcgcgcgaccgcggctgtgctgtctggtgggcagcctggcgactgcccacggcgcgagttctgattcgctttgctcggtcagaattcgtgattcgcgcgaccgcggctgtgctgtctggtgggcagtctggcgactgcccacgtcgcgagttctgattcgttcctctggtgccccctcgggtgagaggagctgtcagtgtagctgactgagggagtctctctcacgactagtgcccgacatcttcggatgccgggcactttgcatatacggattgctgtcagtcagatgagtcgaacatggtcatattccgcttcggcatctgtttgcaggcataaaggcactatctagccaactcacgtggctgattcgcttattcgcccttattcgcctcatccaggctcagcagatcgtcatcggcatcgtaatcgaagagttcgccgtaacggccccactccacggcgatggcgaactgctgatgcgcctcgtcgttggcgtaacgggcgcgcagcaggtccagcatgagctcgccgcggagcttgccttccgcagacttccgcagtgcatgctcaatgttgtgcaccagcggcgcgtgttccatcgccagtgaggcgaacacctgcttggcgcgcagaatgtccgccttatgccaggagtcgcccgcctcggtgatttgcacatggccgtcgcgtaccacgatgacgcgcagcatcgtaccggcatccaccagcgggaacaggtcgtccacctcgaacgaaagagccgaggccaaatctgccaagtcgatgccgtgaggatgctcggcaaccacatccagcagaccggcaagcccgcccggcgtggcgttgggcagcggatgctccttgattttctcgatggtcttggcgggctgaaggtctgatgcgtccgtgacagatgcgtccgtgagcgatgccgatggcgatagagcctcggcttgttgcgtaggctgcgaggcctgtccggtcaaaatcgcgtacagtcggtccaccatcgcctcgaattcgacactgtgacggtcgcgcgggcgctgcagatcaacccgcacatcggcaatcagatgccccgggtgcgagcccaacaccaccactcggtcggccatctccacggcttcctcgatgttatgtgtgaccataagcaccgacttgatgctgcgctgttcgctcgaccacagcttgagcacttcctgacgcaggttttcggcggtcagcacgtccagggcggagaacggctcatccatgaacagcgcgtccggccgcagcaccaaggcgcgtgcaatgcccacgcgctgcctcatgccgccagacagttccttcggatacgccgattcgaagccgtccaggccgatcatgtcgatggcgtccagagccagtttggtgcgttccgcacgtggtacgccgcgcgccttcagaccgagttccacattgtcttgcacggtgagccacggcatcagcgcgaaggtctggaacacgagtgcgatgccgggattcgggccggtcagggccttgccgcgatacttgaccgtgccgctggtcggcttgaccagtccggccagcgcacgcaggaatgtggacttgccggcacccgaacggcccagaatggccacgatctcgccctcgtacaggttgaacgagatgttgtcgaacacggtgagttcggtgccgttgtcggacgtgaagcgctggccgacgtgctgggcttcgatgatggtgttctgcggggtcaccgcccgcagcgaacgaatggtttccagtgcaacagtcatattattctccttaagtctttagttcagtgcgaaacggcgctcggccatgcgctgcagcgggttccagaacaggcggttgacggccaccacgaacacgctcatcacggtcacgccgatgatggtcctcacggtgttgccgctttcggtggcctcggcgatatacgcgcccaagccggaggcggtcagcgtatgccgtccataacttacgatttccgagacaatcgaggcattccacgccccaccggccgccgtaatgccgcccgtgacccacgagccgaataccgccggcaaaatcaaatcgcgccaccgctgccagcgccccagctggaagctgcgcgtcatctcacgcagatcgtcgggaatctggctggccccggcgatcacattgaacaggatgtaccactgtgtgcccaacgccatcagcagaatactgccccagttgatatccacactgcacgccacgaaccacagcgtgacgaacgggaacgtgaagttcgaggggaagctggccagcacctgcacaatcggctgcataaaccgcgaaacgcgcggattcatgccaatcatcgcgccaatcggcacccaaatcaccgagcaggcgagcgtgagcagcgccacgcgcaggaacgtcaccatgcccaacacgaacgcctgcccgagctcgccgaatcccgcatcgcgatgaatcaccagcataagctgcaccagtccgaacgcacacgctgccaacaccagtactgtgaataccacgtcaagcgcgcggctgcgtgcggacttcacgtccgccgcccaacgtccaccggtccgacccaacgggcgggtcagcgtgtcgaacaggtcgtcgacaggcctgaacagccaggccaccatctcatcgatatgtgactgacgaatgatggtcagcaccacactggtcttgcgcaccgccgactcgctttgcgtaatgcggaacttctccgcccacgcggtcagcggcttccacagcagtacgtcgataagcagcaccaccagcaccatcgtcacgatggcccagcagatggccgcgagattctcctcggccgccgcctgtgccacgaagctgccgatgccgggcaacgcataggtgcgattgttcaccgagatcatctcggaggcggtcaggaagaaccatccgccgcctacgctcatcatgcagttccacagcagcggaatcatcgcgttcggcacgtccagtgtccagaatcgttgccagcgtgtgagctgtagtgagcgggccgcctcgtcgagttcagttggttcgctggtcagggaccgggtgaacgagaacgccatgttccaggcctgactggtgaagattgcgaaaatcgacgcggcctccacgcccagcatcgagccggggaacagcaccatccagatggtgatggtggccgaaagaaagcccagaatcggtaccgactgcagaatatccaacagaggaatcagcacgcggctcaggcggcggcagcgcgcggccgccgtgccgtagatgaacgtgaacaccagtgagaagaacagtgccacgaacatacggaacaccgagcgcagcgcgtaatacggcaggtcggcgagattcgtactgacttgtgacggcactcctttcgggccgatcggttcgccgatcgccggcagaatccaagcgatcagaccgaacagcgccagaataccggccgcgaccagtacgtcggaggccaggcgcacggcgaatggttggcggtcggacgcggcggtggaagggttgcgggccgacgcatttggacgcgcgccgacgcgattgaatgaaaacatggtcatgaaaagacctccctatgcataggaaagacgaattatgcaagggttatccggggagccaaggaacactacaggcgagagcccgacttccggataacggaatataagaaaacatggtcatcaccaccgcaactatgactgttgccggcggcggaactactggaataatcaccgtccatcggactctcacctccttcaagccgtgcgctgaaacgccagatcaataccatcgtcggtatccatgcgaccagcaggaggggcggaaagtattcgaatccgccgattcgagccatcgttcaagcttcagcatcgcagggcggtggaattgcgttagttcatgccttgatccgacaagaactgctgacctgcgtgcagtgtctccactgttagcggcagcaacccatatccctgcggtagcctcgcctaccgacgctcccaagataaagcccgcctgcaggtctgtcaactacgtcgcagtgccttggtgttggaatgccatccgacagccattctgtccgcaataatccgtacaattgacgattgctgtgtcgagaagtgggccgccgcataagcccacgtctccatgggtccagtccgaacggccgcaaggcctgactttcggcggatcggcaggcttcccaagggcaaacccgagggataacgagaacaggccaacgcacgtgatgcgcaatcgcgtggatggccccagatctgtggctgatatgcggcagcactgaaggaaaacaatggttaacgctgttgaggcttttgacgccaagcacatgaagccggctgaggaaatcccggccttccgtcccggcgacaccgtcgacgtgaacgtgaagatccaggaaggcaacaactcccgtatccagaccttcaccggcgtggtgatcgctcgtaagggcgctggcgtgcgtgagaccttcgtggtccgcaagatcagcttcggcactggtgtggagcgtcgcttcccggtgcactccccgtccatcgactccatcaagctcgtgcgtaagggccgtgtgcgccgcgccaagctgtactacctgcgcgctctgcgcggtaaggccgctcgtattgccgagcgccgcgacaactccgctaagtgagtcgattcgcgggtgcaatcgtgagcctgatgatgcaggtgcgcgaataaaccgtgaaattcagcccggaaccgtttcggtttcgggctgttttcgtattttccacgtatgatggacgggcgccggcacccctcatatccggcagcatgaatcgcgaggagatggtatgcaggacgatcaggataacggcgaattcccgatttccgacaatccggagagcaatcagacctcgtatgatgacgaggccgatgcccgcgattcccgtacgttccaagtcgccgaccacggcatcgccccgtccccggttcccccggcaccggcgcgcccggcgtacgccgcttcttccgctggcgcgaatgccgcggcagcatcatcgtcagatgatgaccacttcaccctacgcgactttttcctgtggtgcggcgttcccgtgcttatcgtgctgctgattcgcattttcgccgtcggcttttacgagattccttcgcgctcgatgatggataccacggtgcccggcgatcgcgtggtgaccagcaagctcacccccaagatcttcgatctgcagcgcggcgacgtcgtggtattcaaagatcccaacaactggttgaacgaggagcagagcagtgctcccggtggcgggtacctcatcaagcgactgatcggcctgcccggtgacgtggtcgaatgcaagggcgcgggccagccggtgaccatcaacggcgtggccatcaatgagacctcctacattcgccccggcgtggacccgagcgccttcccgttctcggtaaccgtgaccgagggccgcgtgttcgtcatgggcgacaatcgcgccaattccgccgactcccgctatcatcaggatgacggcgatcgcggcttggttcccatctccgatgtggtcggagtcggaatcgcgaaatactggccgcttgaccggcttggtgcgattgatgaccaccacgaagtcttcaaggacgtgcctgacgcttccggctcgaattcctgagtcttttttgaaccgtgtgagtctttgaactgattgagttccgggccgtctgaaccctgaaccatatgaatcctggaccgtctgaatcctaaccattgtgagacgatgggagccgcgcatgattaccccgacacttgacttggaacgcagccttgcggcccagggctatgaccttattactggattcgatgaagtcggccgcggcgcgctcgccggcccggtaatggtcgggtgcgccgccatctgggcccgtgatttggagccgttggatggcgatgatgccgtcgaactgtccgggcaggcctacctcggcgtaccggacggcgtggccgactccaaaatgctcaccgaacataggcgcgaggcgattttcgacgaactgcgcgactggtgcgcggcctacgccgtaggccaggccagcaacaccgagatcgacgaatggggcatcacctacgcgcttggcgtggccgccctgcgcgcgctcagccaagtcgaacgcgaacttggcttacggcttggaggggaatcgacgacaaaaaaggctgcgggggagattgtggaaggtcgtccgggaggctccgtaggggaatccattggaaattgtgggggaagcattcgcgccctgcccaaagtcgccggaattctcgacgggccgagcgattacatcaccaaggcgctcaacacgttcgacgcgccggacgtgccgattccagccgatataacgaccaaagtcaaaggcgaccagcattgcgccaccgtcgccaccgcggcggtcatcgccaaagtgacccgagaccggctgatggtcgacctcgcgcaaagcaacccacgttacgccgcctacgaatgggctcataacaagggctatggttccgccgcacaccgtaccgccatcgccgagcacgggccgactccgctccatcgtgtctcatggcacctgacctgagccgcgtgcgacacgacagtgtgagcgctaacgcaaaactgttgtggacgcgctaaagtcagtattgattaaggtacaagactggccgtgcatggatgccggccgccagcggggaggttaggcaatatggtgaccagccgcaagccaagcaaacgtccgtccatgttcgaagtggccaagctcgccggagtcagccaccaaaccgtctcccgtgtgatcaatgactcgccggacgtttccgacgccacccgtgcgcgagtccaggccgccattgaccaactcggctaccgcccctccaactccgcgcgcgcactggcttcccgccgttcgcgcaccatagggctgatcgccggaggcctcaaattcttcggcccgatttcctccatctcctccatcgaatccatggcccgcgagcacggtctgttcatgagcgtgatgatggtccacgaggccttgtgcgcgcaggccgacttcgacaacctgtgcgacaccttcaatgagcagaacgtcgacgccttcatcttcctgaccccgaccgacgtgatgttcgccgccgcctgccgtgcgcgagtcactcagccgcgcgtcatcgtcaccgccacccacggccaaatgaccgtgcgtgagggattgggccttatctccaccgaaaacaagcgtcgcactgcgctggtcggtatcgaccagtggggtgcaatggccaaagtggtggccttgctgggcgaatacgggcacaaatcggctctgtattttgccggtcccaacgaatggcgcgacgcccacacccgactggatgcgtggcgcaagctcgccgcctcccgatccatcgattcacagatcgtgcgctgccatacgtgggatgcctctgaggcatatgcgcacatgaatcatctcattgatgagtatgggcgtcgaggcgcggcgttgcccaccgcggtcgtcgccgcgaacgacaatcaggccgtcggcatcatgcgcgcgttgcatgagcatgggcttcggattccgcaagacatcagcgtggtcgggttcgacgacatgtctggcgtggataacatgtacccaccgctgaccaccgtgcatcccgatttcgaggggctcggcgtggccgccatgcgcgagacgctgcgcttgctgggggagggcggcgagccgaccttcctgaccacccagcacggcatggggctgattcccgccgaggtgcgtgctcggcggtccttgggaccggctcctcggcggtaaattggcgctgttatcaaaccgttatgatgcgtgacacggtataagttgtgtcgaatgcaggttgtcggtacaatgttttttggaaattgtgagcgctaacaccctccccaaggaaggggataacaacgccggcgctccaaggcaaaggaaagatatggcagcaaccgacaacgcggccgagcaggtcgcccacatcgccgagaagattcgcgctggcaagaccacgctgggcatcgaattcggctccacccgcatcaaggccgtcctcatcgacgacaacttccagaccatcgcctccggcgactacagctgggcttcccatctggaagatggtctgtggagctacaccaccgaggagatctggggcggtttgcagtccgcttacgcctccatggccaacgacgtcgagaccgcctatggcgagaagctcacgcacgtcggccacatcggcttctccgccatgatgcacggttacctcgcattcgacgaggccggcgaactgctggtgccgttccgcacctggcagaacaccaacacctccgaagctcacaagaagctctccgagctgttccagtacaacatccccgagcgttggtccatcgcccacctgtaccaggccgtgctcaacaaggaagagcacgtctccaaggtggcctacttcaccacactcgccggttacgtgcactggaagctcaccggtaagaaggtcctcggcgtgggcgatgcctccggcatgttcccgattgacccgaccactcacacttacgaaaccgcattcattgagaagttcgacgctctacctgaggtcgcagcccagccgtggaagctggagaatctgcttcctgagccgctcgtggccggcactccggctggcgagctgaccgaggaaggcgccaagctgctcgatccgtccggtgccctgaagcccggcatcgtgctcgccccgcctgagggcgacgccggtactggcatggtagccaccaactccgtgcgcgtacgcactggtaacgtctccgccggcacctccatcttcgccatggtggttctggagcacaagctcaaggccctccaccctgaggttgacttggtcaccaccccggccggcgatctggccggtatgagccacgccaacaacttcacctccgacctcaacgcttgggtcggcctgttcggccagttcgccaaggccatcggccagccggttgacgccggtatgctgtacggcaccctgttccgcgcggccatcgccgacgacgtggacgccaactgcggcggcctgctgaactacccgttccgttccggcgaattcctggccggtctgcctgaaggtcgcccgctgttcgcccgcagccccgaggccaacatgaccctcggcaacttcatgcgcgcccagctgttctccgcgttctccccggtcaagatcggcatggacgtgatgaccaagcaggagcgcgtgcaggtcgactctctcgtgggccacggcggcatcttcgccactccgaaggtggctcagaagattctcgctgctgccttcaacaccccgatcaaggtcatgtccaccgccgccgaaggtggcgcctggggtatggccgtgctcgccaactacctgtggaacaccaacgaggatcacagcaacctcgctgacttccttgacggttgcgtgttcaaggacgcccagtccaccactgagaagccggtggcttccgatgtggttggtttcgaggacttcttcgcccgcttcaccaagggcctgcccatcgagcacgccgccatcgaaaccatcaacctcgaagataagtaagcctttctgacctccctctattgagggaggtccttgagattttgaaaaaacgtccatccatcacagtggaaaggaaaaccaataatggcaactttggctgattacggccccgaggttcgcgccgaggtcaagcaggttcgtgaggtcgtctccaacctgcaccagcagctgatcaagtggaacctggtcgtgtggaccgcgggcaacgtttcccagcgtctgcacaccgccgacctgttcgtcatcaagccctccggcctgcgctacgagtacctgaccccgtcctccatggtcgtgtgcgaccttgacggcaacgtggtcgacggcaccgaagccccgtcctcggacaccgcttcccacgcctacatctaccgcaacatgcccgacgtctacggtgtcgtgcacacccactccacctacgccaccgcttgggctgccactggtcagaacatcccgtgcggcctgacgatgatgggtgacgagttcggcggcccggtgccggtcggcccgttccgtctgatcggctccgaggcgatcggcaagggtgtcgtcgagaccctcaagaagtacccgaagtccccggccgtcctcatgcagaaccatggccccttcaccatcggcaaggatgctgaaggcgccgtcaaggccgctgccatgaccgaggaagtcgctcacaccatgtgggccgcccgtcagctcggtgacatcatcgagatcgaccaggccgacatcgataagctcaacgaccgctaccagaacgtctacggtcagcactgatttgatggagtgtccgccgcgttacggaaggcccgacgtaccttcgtacgccttcgccttccgcgccttgcggacacacacatcaaatcagcgctgactccgccagcacggtggtgtcttggctcccctctctgaggggagctgtcagcgatagctgactgaggggagcctcggtcggcgaatgaaacttaaacaaacccccataaacaaagaagtaaaggaagtaaccctatggttatggaaaaccccttcgagggcaaggaaatctggttcggcgttggttcgcaggacctgtacggcgaagaagccctgcgccaggtcgccattcactccgctgaaatggtcgactacctgaacaacaccggcaagattccggccaagatcgtcctcaagcccaccctgaagtcctccgacggtgtcaaggaattcatggtcgaggcttccgccaacccgaacgtcatcggcgtcatcacctggtgccacaccttctccccggccaagatgtggattcgcggcctcgaagtgctgaccaagccgctgctgcagctggccacccagcaccacaaggaaatcccgtgggagaccatcgacatggacttcatgaacctgaaccaggccgcccacggcgaccgtgagttcggttacatcgtctcccgcctcggcatcaagcgcaaggttgtcgtcggtcactacaccgatcccgaggtcgccgagaagctcggcacctgggcccgcgcctgcgccggctgggatgcctccaacaacatgaaggtcatgcgctggggcgacaacatgcgtaacgtcgccgtcaccgagggcgacaagaccgaggctgagcgcgtgttcggcgcctccatcaacacttgggccgtcaacgagctcgtcgctgcgtacgacgccgtcaaggacgaccaggtcaaggagatcatcgaggactacaaggccaagtacgacgtcgacccggctctgctggacgccaagtacgactccctgttcatcgccgccaaggaagaggccgcgatggtcaacatgatgcgcgccaacggctgcaccgccggcgtcgacaacttcgaggacctcggcgctctgccgcagctgccgggcgttggcccgcagcgcttcccgtccgagtacggctggggcttctccgctgaaggcgactggaagaccgccgtcctcgtgcgcatcggtgccgtcatgggctacggccttgagggtggcgcctccctcatggaggactactcctacaacttcaccgagggtgacgagctcgacatgggctcccacatgctcgaggtttccccgtccatcggcaccatcgccaagccgaagctggagatccacccgctgggcatcggcggcaaggccgacccggtccgcctggtcttctccggcaagcccgccaaggacgccgtcgtggtctccatgtccgacgttcgcgaacgcttccgcctgctcatggacgtcgtcgacgtcgttgagccgcagggctccctcaaggagcttccgtgcgcccgcgccgtctgggagccgaagccgagcctgaagaccgctgttgagtgctggatcaccgccggtggttctcaccacacctgcatgaccacctccgttggtcgtgaggcttgggaagacttcgcccgcatcgccggtgttgagctcgccgtcatcgacgagaacaccaccgctcgccagttcgagaaggaactggagctgtccgagatgtaccaccgtctcaacaaccagcactgattggcggagcgtataccgcctttcctcaggttcgacgtaccttcgtgcgccttcgccttcggacggcggtctccgcacgcgccaatcagcgttggcaagccagcaccgatgactaaatcagtctgctgactgctaccgctgaaaaagggctgttccgggaaaccggagcagccccttttgttgttatcggcaactccccacaaacgcatcaaaaatcgtctgcgagcgtggatctaccttgtagagaaactcgggatgccactgcacggcccacaggaagtggcttgccggccggtacagggcctcgatcacgccgtcgggcgcaacggccatgatttcgagaccgggtgccacatcacgaaccgcctgatgatggtagctgttcactgcaatctcagtctgccctgcgaacaatgaagccaggggagtgccgggcaccaaggaaacgttatgtccgaacgcatcgtacggcggattcatatggtgttcgatatcgctcggatgctggcttggcagatcctgccacaacgtgccgcgcagcgctgcgttgatgaactgaatgccacggcagatgcccagaatcggcttgtcccaagccattacagctggcagcagaatcgattccattcggtcgcgctcaggagagagcacctcgctacggccggtggcggaggccgctgcgccaaccatcggtcccacatccggcccgcccgtaaacagaaacgcgtcaaaccgttcggcgcattgcgcaagaatgtcggtgtcatcggtcagcggcaacatgacgggcgtaccgccggcccgcattatcgcctccatatatccgggcagcatccacagactatcgcgcccgtaatccatcagcggggtcaccgcaatgagcggtcgattcgtagtcatgcctgcctcttttcgcccaggtgttgttttcgtcgttctgccgcgaatcgcttgattcagtggccgataatgccgccactgtaccgaaccaatgtaaccggtcggccaacattatttcgtcagccagccgcgacgagatcgcacaatgtgccaatgatgggggcattcggtgcgaccttgtcaatgttcgggccattgcactttcagcggggaaagcatgccccgtccgcgcatcatgatgaacgagtaaggttgacggggagggagaatcacatgaaccaggcatgcgtacgcaacgacaccatcgacgcgggcaaccatcatggccgaccgcaataccggtcgttcctgcgatttctgacatcgcaggaacgcaacgtcatttggctgttgctggccattgcttttcttccggtggacggcaccacgcttggcctgtacgcgccgttctggtcgccaatcagtccggcgctgttcgccgtgtactgcctatgcaattggcggcaactgcgcatcgcagccaaccggtacctgccaatgttcctcctaccggtggcctgcataatcctgtccatcccgggatggctgaagttcggcatccacctcaacgccgcgttcatgagcatcaccggattgctgggcgtgctcgccactttgggtgcgatcgcccttgcgttcgacatcaaacgcattccgtggcgtacgccattgcggattctcatcgcatcatactgggtttccttcggagtgggcgtcgtgcaatggctgtccatccgtctgcacgccaaaccgttgaccgactatttctcgcacctcatgtaccggcaatacatcagcgacaactcggtgtggggcggcggccgtccgcagttcctgttcgccgagcccagctatatcggcatgcacctgttcggcatactgcttccgctcatgtggctcatgcgcgggcgcgaccgcatctacgccaaacggctgcgtgacctcatcgtcacgtatgccgtcggcgcggtgctcatgcaagccggcaccagaatcgtcatcgattccgtcgtggcgttgctgatcgcccttgtggcgcgcaccgattggcatgacggcgcacgccgcgtccggggcatgctgcagattctcggcgcatgcgcactgggcctgctgggtgtgctggcggattccagactctccgccatcgcggaaaacggggccgagggagacggatcgttcttcgcgcggatctaccaaagcctcgatccgatatgcggattgctcacccatccgtggacgctgctcaccggttatggcgcgggcaacatcatcaatgcggtgtgggccggcgcggccaaagccggacggctgctggacggtcttggcatgaacggcggcatggtcacgggattcgcggccggcgtgaacgcggacacggtgtggacgatgtgcgcgtataccagcgtcatcgccgaatacgggctgatcgggctggccatgctggtcggagcctcgatggtctgcatgacgcgcgggaggacggtatgccgtggcggtgcggatggcgcatcgtccgacgagctggcgcacggtgtttgtgtcgccgacgttgccgggggtaatagtggtggtggcgttgccggcgcgggttcgggcgaatccggcgtctggcacaagaccgtcatctgctggctcgtcctggtcgcatacctgtacatccaatgcgagaactatgcgttcgccgctctgccgcttcttgtgttcgccgcctcgaaggtgaggcgcgagcctgatttctcgcgggccgacgcatcgacgcggcccgagatggaccaaaatccagaataaccgacattcgccgctgttccgtttttcgctcaaggcgtatatctcccgtatcttgaggtgcatcatgtatcgtcgcggctaactaatcggcgaaacgcggcatgtttcgcattttgggcgaaaagcccaagtcccacaggaggtattgatgacgttcgttgcacggtcggtgcgctatgtgctcagaaaacgagtgcgaaccatagtgctccttataatactgaccatcataacggcgagcatgctatccacgatcgcggtttctcgggcagctcaacaggccgccggacgaatcgagaaggaagcggtcggtggatttgtgctgtccagcaacatgcagggcagcatgctcacgcctcgcggaggcggcatggtgcgccccgccgacgtgcgcaggatcgcccaactgcccggggtcgattcgtatatggtccgtcagaacgccaccgccgatctcgtgggggcgaatgtggcgaaggtccccggcggcgatgattacgatgcgacccaggagcagcagtttggcaacgccgccaacgtcatgggcacgaatgattcgtcgaaactcaacgtgttcacgtcgcgcacgctcggcatggccgaaggacgacatctgaaggcctccgacaagtacacgtcgatgatccatgaggatctcgccaaagccaacgggctcaaagtcggagacacgctcacgctcaaggccaacgcctatgacgccgacaacgaatcacattcgacggcgaccgtcaagaccaccatcgtgggcatattcaagggcgacagcgccagaaaggtatccagccgagcggaactcaccgccaacaccatctacaccgatctggataccacacgcgacctgtaccagtacaaggacggcaaggaaatataccaggacgccaccttcgtgctgtccaagggcgttgacgtggagaagaccatggatgccgcgaagaaactcccggtggattggaacaactatcagatcacgcgcaacgaccagtattcatcgagcatgctgcatgccgcccgcggcgtgcgctccatgatgcgcggcgccctgatcggcgtgaccgtctcggccgtgctcgtgctcagtctcatgctgctgctgtggatgaacgaccgtcgtcaagagatgggcatactggtgtcccttggcgtcggcaagccctccctggtcgcccaatacctcaccgagatggtgctgatcggtctgccgtccctcgccctcggctggctgtgcgcgcagggaatggcccaatggctcggcgccacggcgctccattccgtgaacgcctccgcggcgaaggagctgagcagcatggggcaggtcggcggcgatcttgaatccagcatgtcggtgcgcaccctggattcgctcacggtgtcggtcgacgggaccgccatgctgtacgtggcgctcggattgttggcggtgatgctggtgtgcgtcgcggtggcgtgcatgccgatgctgcgcaaatcgccgcgagacctgtcggagattcgatgatgagcatgaatgtgtggaagcgtgccacgttggcgatcgtacgcaagccggtacgtagcggcatcatcggtctgctgatgctgatggtcttcacgagcctggtggcgcaggtcggagtctcgacggccctgcgtaccatgtccgacggcatcggcgcgggcatgggcatagggtttaccgtcagcgccggcgagaatcccattagcgccgaggaggcgagccggttctcgcgtatccccggtgtgacgaagaccgcctatgcgacgaagaccttggcgcaggtggatggcgcgcgcccggtcatgccccggcagggcccccgattggactccgatctggccatgcaggtcagcgtgctgggcaccaccgattcctcattgtccgaggaattccagagcggcctgtaccgcctggagcagggccgccatatctcgggcgacggcgacaatgtgctggtccaccgcgacttcgcgatgcagaacggcctatcggtcggctcgacattccgtctccggcaggaggggcgcaacgccacggtgcgtgtggccgggatcttctccggcaacgtgcaggcccaaagccccctgccctcggacacttccgagaacctcatctattcgggtaggcgagtagcttccgctctgaccggaaacgaccggatcgacatgatccgatgcctgtcggataatccgcaggacctgtccgcggctattggacgggccaagaccatggccggcggcaagtacgacgtcaccgacgattcggcccggctctccggcgtcctgcaatccgtgcagacggtgcgtaatctggtgcgcatggtgctgctgtccgtctgcctcgcggacgtactggtgctggcgatggcgctggtcttctggattcgctcacgcatccatgagataggcacgcttctggccctcggcatcgacaagatgcggatcgtcgcacaactcgccatcgaaaccggactcatggcggcggtcgccgccctgtgttcgctgggcaccggcgccatgctgtcgggatacgtgtcttcccgactgttgcgcgattcgggcgtcgcgccgttggaatcgttgcacgtggaggccttgccgcctgagcagacgatgctcatcctgctgctcggatgcgcggtcatcgccgtggctcttgccgtgtcatgcgccgccgtgctgtccaaatccccgaaatccattctttcctctatgcgttaggagtcaccaatcatgtctaactgtctgcaactggaccatgtcgattacgcctacggcgcggcgaagatccgtgttctttcggatgtcagcgcggatttcgaatccgggaagatgtatgcgatcaccggcccgtccggcgccggcaagagcacgctgctgtcgctgctggccggcctggacgccccctcccggggagtggtccgcttcgaaggggaggacatcgccgcatcgggctatgcgaagcaccgccgggagcacgtgtccctggtgttccaggaccataacctgatcgactacctcacccccgaagagaacctgcggctggtcagcgccaaggccgatatgaagatcctcgaggaactgggtttgagccgtgaggaatccaagcgcaacatcatgcacctgtcgggcggccagcgtcaacgggtggcggtcggccgcgcgctggtcgccccgggccgcgcgatcctcgcggacgagccgacgggcagcctcgacccggagatgaccgacgaggtgattcatctgctgcagcacgccgcccatcagctcggcaaatgcgtgatcgtggtgacgcattccaagcgcgtcgccaactccgccgatgtcgtgctgcgtctcaggagcaagaaactgacccgggcatgacccacctgggccgggcggcaccccggcgacgacccgcatggaatcatcgtcataatgacgcctgcgattcctggacatgagaaaccgcacctccgatcatcgaatctggattactccagtccaacaatcggggtgcggttcaaaaggccctttttttgtgtcggattacgaaccgcgcgtctcaccgcttgccgttgtagatctcgttgtcgatcacatcggcgaacacgcgattgacggccgggcgcaccactttcagcgacggtgtcaggcacttgttctcctgcgtgaactgcgtgtccagcacggcgaacttgcgtacggattcggcgcgcgagaccgtcgcattcgccttgtccacgtactgctgaatctcctcgcgcaccgcggcgttcgtggcgagccggtcgaccggcgtctccgtggacaggccgtgcgcgggcagccacatggccagcgactccgggtcaagtgtcaccagcgcgccgatgaacgggcgctggtcgcccaccaccacgcagtgctccacgatcgggcacttggcgatctcttcctccagcggaatgggggagacgttcttgccgccggcagtaataataatgtccttgatgcggccggtgatgatgatgcggccctcatcatcgatctcggccaagtcgccggtcctgagccagccgtcggcggtgaatgcctcggccgtcttctccggcagattgtggtagccgcggaacacgttcgggcccttgacctgcagttcgccttcgtcggaaatgcgaatcgaggagccgggcgcgggctggcctacggtgccgatcacattgtcggtcacgcgcgtggcggcgaacggggcggcggtttcggtcatgccataaccctgaatcatcggcagtccgatgccgttgtagaaatgcgccagatcgagcgacagtggtgcgccgccgcaggccacgtacttgatcttcgggcccagagcaccgcgcaccgtgcggtagacgagcgtttcgtacttggcgcgctcggcgatttcggcaaacgtgtgctgctcgccggcctgctccttgcggctccagacgcgcgcggcctcggcggccttgacaaacaggcggcccttccagccggcaccggccttgtgcgaggcggcgttgtataccttctcgaacacgcgcggcacgcccagcaggtaggtcggttcaaacgaacgcaggtccggcagcagggttttggtgtccggcagataaccgaccacgccgtcatcggaggcgatggaggcgtactggatgaatcgcgcgaagcagtgggccagcggcaggaagagcagcaggcgcggatggtcgtcaagcaccacttcatgcaacgcctgcgaggcggagatggtgatggacacgaagttcttgtgggtcagttcggcacccttcgggttgccggtggagcccgaagtgtagacgatggtggccagatcgtcggcgcgcacggtggccacgcgctcgttcagttcctcgtccgaaacagccacgcccagaccttcgagcgcgcccagcgcgttgccctcgatcatgagaatctgcttcaaggcaggacagtggtccttgaccgagtcgagccggtcgaagcgctcgcggttgtcggcaaaggccagcttgaccgccgaatcgttcatgatgcgctgggcttgcggggcggagtcggtgtcgtagatcggcacgcttaccgcgcccactgcggccagtgcgaaatcgagaatgccccattcgagacgggtggaggaaaagatggtcaccgcgtcgcccttggcgatgccgagcgcgatcaggcccttggcggctgagaccacgcgctcgtggaattcgccggtggtgacgttctgccagcggccggggccgattttcttggcggcgattaccgtgtccgcgccggtgcgggcaaggcgatcggtaagtagggagtagatggtctggttgtcgcggatttcgatggattcgccaggcgtggtgtagtggtcaagcataagcgggccgtgtccttacgtgcgttgcgtgatggctgttgacaaaatcgagccattctgacaagttaggttacgctggcgtaaggttgcgcgcgttgtgggcaatggagaagttgtctgtctggttttgtggattgtatacaacgccgtgtctaaccggtttgctctacggttatgacaccgtgtccatttcgggagccatcgacttcctgcaggacaagtacgcgctgagcccggccctgcagggtctggtcatcagctccatcatgatcggcggcgtgatcggcgccggcttctccggcttcctgtccgataagtacggccgccgccgaagcactggtcgccgcgcaaaaagcagcactaggccgcgtttgctgcgtctattggcgaattgatcatatgggtcgtctgcgtgcagacgacccttttgcgttccgtcggcttctgacaccgtagaaacgtgctttctcggcttcgaggggctgattttgccttatctggaagtctacttccacttcgaggggctgatgcccaagtagacacggccctaaaacggcggaatgacgttgacgtgtagccgtttatacttccgattacatggatgaggagcccctcgaagcggagatagacttccggcaaatgcgaaatcagccccttgaaacggaagtaggcctccggcaaacgcaaaaatgagcctcctcgaaacggataaatgcacgtattgggtgtagtggatgcttcagcccctgatatcgaagcatatttttttggttggcgcgtctagcatgcgcactccgcaatcgataattctgtggcctctctcactttaaaagtctggcgtgtgcgagggcgttcgcttaaggtgaatgggattgcgcggaatgtggagcgcagggtcatgaccatgcgcgtgctgcagatccagctgcgctcgctgaccgccatggatatcgtggcctacggcggtgcggcggccggcattggtgtggctctatggcagtatgcgcataccaccgcagccgccgcaggagccagcaccgccggctggtcgccgatcatgctcgccgcccacctgcccggcgcattcgcctacctggcctacggcctgcaatacctgatgccgttcggtgcgggcttcccgctcaccctcgccggactgctgctgattgtgctgccgtccgccgaattctttattcccatgcgtcagcttggctcgttcttccacgtggcgatgaacggcatgacctccaccaagcgcatcttcgctctgctggacaccccggagcccaagcatggcacggcgaccctgccggccaacgattccgattccgctgacgacggtctgacggtccgcttcgaccacgtcggctattcctatgatgatgccgggcacggcgactccaagtccgcatccgcaaagaccgataagcaaggtgaaaccagccccaattccgccgtcgctcctgcgctcaccaacatcaccttcgccgcacggcccggtcagttcaccgccattgttggcatctccggttccggcaagtccacggccgcctcgctgctcgccggtacactggccggttaccgaggttcgctcacgctgaacggtgtcgaggtatccgatttgtcaggcgaaacactggccggagccgtcactgtgattggtgccagcagccatctgtttgcgggcgcattgcgcgagaatcttctgatggccttgcccgatgacgagattcctgattcgccggattccgtggactcccgtctgtggtccgcgctcgagcaggcgcgcattgccgacttcgtgcacgcacagccgaacggactgggcatgccgattgagtccgatgccgccaacctgtccggcggccaacgccagcgcatcgccatcgcccgcgcgctcctgcatgattcgccggtatttgtgttcgatgaggcgaccagcagcgttgacatggaatccgaagagctgatcctggatacaattcgcgaattggcgcaatcccgcggcaagacggttattatgatcacccatcgcatggccaacgccgaacacgctgatcaagtggtggtgctcgaacacggcaagtcggttgagaggggcacccataccgagctgatgacggcggacggcgtttacgccaagctgtttaccacgcaggcagatattgagaacttcggagaaggccatgctcggcgtgtgctgcaggttggttcccgcaagcaggagctgtccgacgacagtcggactgagggtggcgcagcgcgcgtaagcgcagaggcgggtatgacggttgaccgcctgcagtcagctttgccgacggcttccgttggcgggagtgagcaggcctcggctgagactccggctggtgttgcaaatagcgattcgtcttccaaaatgagcacattccaagtgatcaggcgactgcttaaggaagcccgacctctggcaggactgatggcagcggcctccaccgccggcaccatcggccatctttcggccactttcctgcccgtgttcggcattatcgcggcatttgcacttaccggtaatccggtgtggggcatgggtgttgcgcccgccgtcatcatgatgattatctgtgctcttctgcgtggcatcacccgatacattgaacaatatctgaaccacaatgtggcattccatctgctcgcactcttccgttccaaggcgttcgccgcgttgcgcagactggcgccggccaagctcgcgggcaaaggtaagggcaaccttatcgccatgctgaccaccgatgtggaactgcttgagatcttctttgcccacaccatcagtccggtggccatcgcggtaacctccaccatcatctacacgattgtggccgccaccctaagcccatggatggcgctggcgttgattgccgcccacctggttatcggcatccttgtgccgcgattctttgccaccggcgtacgtaaccttggccctgccatccgtggcgctgccggagaactcgacgatgtgatactcgatgacatgcgcggcctggacgaaatcatccgatttggtcgcggcgaggaacgtgcgcaggccatcgaggaccgtacccatgcgttgtggaaggatcacgccaaactcagcaaggtcaacggccgtttcaccggaatcagcggactcttggtggctgtgctcacagcggcttcggtcgccgtggctattgcctgtgccggcgcgaacccgcagagcattccggctctgattgccgccttcgtgctgttcgccggctcgttcggaccgactttggcgctcgccgccttgcccgctaacctgactcagaccttcgcgtccgctagccgactgttcggactgatggacgaggtgcccgctgtgaccgagaatggcactgttgtgccgcaggagtatatgggcatgcgtcttgatgacgtcacctttgcatatgcgggggagcgcgaagtcctgtccgacttctcgcttgacgtgccgcagcatggcgtgctgggtatccaggggccgtccggccggagcaagtccaccatgctcaagctgctgctgcgctactgggatccgcagcgcggtcaggtgacgttgtccggcacgccgctgcccgaggtcgatgtgcatgctcgccgacgtattcaggccatgatgagccaggaaacccacctgtttgatggctctatccgagacaatctgctgattgctttgcctgagtccaaggttgaagctgcaaatgttgcaggcaatggggaagtgggtgccaataccgttgattcccgacagcagcggttggcggcgcaatcggcagagggcgatgccgttcaggtggcagcagctgacggtctcgacgctcgtttgcgtcaggctctcgccaaggcctccgtgcttgatctcattgattccctgcccgatggccttgatactcaggtaggcgagttgggcgaccgtctatccgaaggtgaacgccagcgtatcggtttggctcgtgtgttcctgcgcaatgctgatctggtgcttttcgacgagccgaccagccgtttggatgctttgaacgaggctattattctacgttccattcacgctatggccgtgggtgagcagcatgcagacaaggagcgcggcgcggctgtggtgctggtctcccaccgcgaatccgccatgcgcattgctgatgcggtactcaatctgtaactgcctgtaactacgcgggaatcacatcgcattgcgttacgttaccgcgttgcactgcggttcctcgcgggtggcggcgatgccatctccggtcgtcattgcgttgctgcgtttgtgttgcgatatgtgatgcggcaacgcagcaatgcggcaatgcaatgtgatgtggcaacgtggcaacgtagcgatgcaataacgcggcaacgtgacaacgtagcgatgcaataacgcggcaacatggcaacatggcaatgcagtaacgcaacgcagcattcacgccttgatcaaagtgccgatgatgagcgccttctgcagccctgggcggaacaggtcgtgaaattcatgcgacatttcggtttcgagtttgaccgatgcatggatgtcgttagtgcgaaggcgtgcctgttcggtgccgatgatgtgctcgagcaccgcgaatccctcttcggttttgccggcttgaatgaggaatcgtgggctttccggtgctcgcaccatggagagcaggaacgcggcggccggaatcgcacccagcctcagcatccaacgccaaccggcgttgacatcccagcttctggaaccgtaggaggcgatgatgtagttgatgacattggtcaggaagatgccgcataccgcgaggagctgataggaaaaggcaagcagaccgcggatattgaccggcgcttaaggccagaccgaacgtatatttgcccgatccgtgagtacgtatggttggtcccaagggattgcgctgcttggaagtagcttgaaacaggcccgccatgtgcttttcctctcaatacagctatggggggtgcctgttcatactagtcagattcttgtcatatggcgttgaatatctacaaatgtgggcactagtgaggcggctgagtggtggaatcgcgccgtggtgtgtgggtgttggggactcacgagcatgctgcgcgttatttggtggtgtgctgagagtcgggacctactcacgttgggggaggggatgaagagcctctgagacaagtcgctgttcgactggagatttgctcacgtggaaagcatggaaaaggcgaaaaaaatcaggcgtgtcgggtgatttgacaaattggtacacaggtgtatcatcttaggtattggtacacgggtgtaccaaagaaaacaccccaaggaaaggtggccagaggagacttcgcaagcggccaaacgaattgaaatccaacgcagcagtcgattcgtttttggcaatcggaaggcagtcgtcaacaatcggaaggcagccaaagacagccggaagataaccgagaagtaaccggacgaaaaccggaagccagtcggaagaaagccaaccacccgcaagtcaactccaatggtccagaaggagataacatgcgcaacaccaagaaggtcatcgcggcaacggcagccgtggccacgctcgtcggtctcgccgcctgcggcagcagcaacgacaacggcgccaacaagggtgacgctgacaaggccgaactcgtgttctggggctgggattccggcaactcgatgaaggaaatcctcgctgacttcgagaaggccaaccccggcatcaccgtcaagttcaacaacaccggcaccgccgagaagacctccaccgcgctctccaacgccatcgccgcaggcaacggcgcccctgacgtcgtgatgctcgaagatccgaccgtcacccagttcgccgtcaccgatggcctcgtggacctgagcgaattcggcgccgacaaactcgccgacgacttcgccgccggcccgtggaacaagctccagtacaacaacaagccgtacgctctgccgattgattccggccccgaaatgttcttctacaacaaggcagtgttcgacaaggccggcgtggacggcgagtccatcaagacctggaacgactactacgaggccgccaagaagatccgtgccaccggctcctacatcaccaatctggccggtacctccaacgactatcagccgttcaccgcccagatctggcaggccggtgcccagccgtggaaggtcgatggcgagaacatcaccatcaacatgaccaaggacgagggcatgcagcgctatatccaattcgtccagaagctcatcgacgaagacctcgtggacgccaagaccccgaactggtccgacgattggaaccgcgagctcaacgatggcaccctcgcctccctgaccatcggcgcttggatgccgatcaacctcatgaccggcgcccccgatcaggccggcaactggcgcgtcgcccagctgccgcagtgggaggaaggcaaggaagtctccgccgaagacggtggctctgcacttgccgtcacctcgcagtccaagaaccaggccgctgcctacaagctcgttgagtacatgactcatggcgagggcgctcagaccatggccgacaccggtaccttcccgtccctgaagaagatcctccggtccgactccttcaccgacccgaccaccgagtccaacaagaagaccaacgactacttcggcggtcagaacgtcaacgaagtcctttccgccgcggctcagcgcccgaccgagaagttccagtacctgccgtacaacccgtacgcccagaccgcttacggcgacgaagtctccaaggcctactccggcgacatcaccctggagaaagcgcttgaaaactatgccaacaagctcgccgagcaaggcaagcagcagggctacaacgtcaccgtcaagtgacgcaaccgatctattgccggtacatccggcactgaccaacaatcaaaacctgcggctaggccactctccttccgcctagccgcccgatctcccaaagcggggatgctccccagtgtccccgctttcccgtgccctcgcctgacgtgaccgctccaatcgagcgaccccctggtagcgggcgcagcacagcaatccgtattccaagaaagcaatcgattatgtccgatcaaacaatggccgcagccccgcagccaacggtgggaatcctgcctgaggaggcggatctgcacacggccgaggcccgcgtcaacaagcacaaggccgactggcgcggctggaagttcatgtggccgttcgccgtggtgttcgtcttcgtgttcatcatcccaattgtgtacgccatttacatctccttcttcaagaagcagatggtcggcggcaccaagttcgtcggcttcgagaactacgcccgactgattcaggatccgcagttctggagctcggtgggccgcgtcactatcttcaccgtattccaggtgccgatcatgctgtttctggctgcagccatggccctcgctttggattcgatgaagctgcatggcaccaagttcttccgcatctccacattcctgccctatgcggtgcccgcagtggtctccaccatgatttggggtttcgtgtatggcgccaaatacggtctggtcggctccctcaacgacttcctcggcaccaacatcgatgtgctcaaccccgacgtgctgcttgcatccatcgcgaacatcaacacgtgggaatatgccggctacaacatgctgatcttttacagctccctaagcaccattccacacagcttgtatgaggccgcctccatcgacggcgcttcggagtggcagattgttaagaagatcaagctgccggagctgaagggctcgctggccatcacggtgatcttctcgatcatcggcagcttccagctgttcaacgagccgagcattttgcagaacatggttccgggcaacgcgatcaccacgtactacacgccgaacatgtacgcctacaacctgagcttcaccggcaatcagagcaactatgccgcagctctggccatcgtgatggccatcatcaccatggccattgcgtatgtcgtccagcttaagagtatgaaggagcagatgaagtaattatgagcactgcaaccatgacttcaacaacaaccatgaccctggccgatctcaaggctcaggaaaaggccgccaagaaggccgagaaggagcgtcagaagcgcatcgacgccgacgagaaggccgagcgcaagcgcgccgccaaaaccggtttctccaacccggcgaacccgacccgctcgatggccctgaccatcgtgtgcgcgattttcgcggtctactgcctcttcccgtttgtctacctgatgattaacgccaccaagacccagtccgacttcacttcgacgttcggcctcggtttcggcaaaacgttcgccctgttcgacaacatcgccacggtgttcacctatcaggacggtatcttcggccgctggttcgtcaacacgattctgtatgtggtggtcggcgccggcggtgccaccttgctggccatcatgggcggctatgcgctggccaagttccgcttccccggccgtaagctgtgcttcgtgatcatcatcggcgccatttcggtgccgggtatcgcgctggccgtgccgcagttcctgctgttcgccaagatgggcctcacgaacaccccgtggtcgatgattatcccgagtttggtatccacgttcggtctgtatctgatgtggatcttctccgatcaggccgtgccggatgagctgcttgaagccgcgcgcgtggatggtgccggcgagttccgcaccttcttccagatttccctgccgctgttggcacccggcatcgtgaccactgcattgttcgccattgtagcgacgtggaacaactacttcctgccgttgatcatgttgaaggattccaactggtacccgttgacgatcggtctgaaccagtggaaggaccaggcttcaaccgcaggcggtcaagctatccaaaacctcgtgattaccggttcgctgatcacgatcatccctctggtgattgcgttcctgtgcctgcagaagtactggcagtcaggcctcgccgcaggcgccgtcaaggagtaacctctggctccctctgacgggagctggccgcggagcggactgagggtggtcatatggggattcgactggcgaccacccccagtcagcttcgctgacagccccgccagcgggggcggcctctctggtgttcacaaccggcaaacacagcacttcccgcaaaccgatacaataaaggatttgattaatatgactactcatagagcatttaggtggccgtccctgctgacggaatccggccgcggcatcgcgttcggcggcgactacaacccggaccagtggcccgaggagacgctggacgaggatatccgtctcatgggtgaggccggcgtgaacgtcgtatcgctggcaattttcagctgggacaagatcgagccggtcgagggcgcgttcacgttcgagtggctcgaccatgtgatcgacaggctcggcagagccggcatcgccgtggacttggcctccgccacagccgccgcgccgctgtggctgtacgaatcccatccagaggtgctgccggtagaccggtatggtcataccgtcaacgcgggctcacgccagtcgtggcagcccacaagcccggtgttcaaggaatacgcgctgcgcctgtgccgcaaacttgccgaacactacaaggacaacccgtatgtgaccgcctggcacatgggcaacgaatacggctggaacaaccgctacgactactccgacaacgccttggccgcgttccgcacgtggtgcgaggccaagtacggtaccatcgacgcgttgaacgaggcgtggggcacggccttctggtcgcagcacgtgaacagtttcgacgaggtgctgctgccatgtcacatgggcggcgacgccatggtcaacccgtcgcagcagttggattacgagcggttcggcaacgacatgctgctcgacttctacaaagccgaacgcgacgccatcgagcagatctgccccgacaagccgttcaccacgaacttcatggtctccaccgaccagtgcgtcatgaactacgccaaatgggcggatgaggtggacttcgtgtccaacgatcactacttccatgagggcgaatcccacctggacgaactcgcctgctcggacgcgctcatggactccctcgcgctgggcaagccgtggtacgtgatggagcactccacctcagccgtgcagtggaagccgctgaacacacgcaaacgggccggcgaactcatgcgcgactccctggcccacgtggccatgggcgccgacgccatctgctttttccaatggcggcaatccaagtcgggcgccgaggcgttccactccgccatgctgccccacgcgggcgccgattccaaggtcttccgcggcgtatacgagctcggtaaggcgctgaagaccctctccgacgccgggctgcagggcactgagctcgagcgtgccggcacggcgatcctgttcagcgcggaatccgaatgggccacacgctccgaaaccctgcccagcatgaaactcaaccactggcacgacgtgcgcgactggtaccgcggcttcctggatgccgggctgcgcgcggacgtggtgccgctcgcctacgactggaccggctacaaaaccatcgtgctgcccaccgtgctcagcctgtccgacgaagacgttctccgtatcgccgacttcgcgaaggccggcggaaccgtcatcgtcggctatgccgccggcctgatcgacgagcacttccacatcggcctcggcggctaccccggcgccggcaacgggctcctacgcgacatgctcggcatccgctccgaagaattcaacatcctcggtgaagaagccgaaggcgagcccagcgaaatcagcctgtccaatggtctgacgacccgcctgtggcagaacgacgtgacttccgtagccgcggacaccacagtgcttgcctcttacgcaggtgagtccgccgccgactgggagctggagcgcacccccgccatcaccagccgcccctatggcaacggtaccgccatctacgtgggctgcgacctcaaccgtcacgacattgcccagttgctcaaagcacttggctcccgatggcaggagttgtcggcgcagccgactgagagtggtcaaactccaacctatcccactacagatccccgcatcctgcacaccatccgccgatccgcagacggctccacccgcttcgatttctacctcaaccgctcaaaccagcccgtcgccatcaacggtgtggaaggtgatcccatcatcgcccaccgttgcgagactgacgccgttggatatacgctgaaccgcaacgccattcttatcgctaaaacgtcctgctaaaccgcgctagaatggcaatgttgtccggatagaggagtgcggcatgagcgacgagaaaacagccaagcgtcgagcgacgctacgcgatgtcgctcaggccgccggtgtatcgctcaaaactgcgtcgaacgtgatcaatggctccgggcgtatgacagatgagacccgtgccaaggtcgagtcggtcattaaggacctcgactaccgagtcaacgtggccgcccgcaacctcaaccgcgatcacaccggcttcatcaccctcgccgtgccttcgctgattccgccatatctggccgagctcgccaaccgcaccatcgaggccgcccgtcagcgcgactattccgtatacgtcaccacgtatgcggaaggctccgcgaaaggcgcgcgcgatctgctgaagaagttcaactccacggtgtccgatggcatgatcctttccatgagcgaggtggaaaacatttcgcccgatgatctgaaggttgattttccgctggtcatcgttggcgcgcgtaccacgtggggcattgtggatcacgtgaccccagacgatgtatccgcagccgccatggccgcaggctacctgtatgaccgcggttccaccagacttgcagtgatcggtgcccgtgacgtttacgacgaagatgcattgctgaatgccgtagaaggcaacgcgcagctgcgtctgcgcggcatcatcgaagagacccgtaggcgtgggctctccttggatccgcagctgattggcaacaccgatcaggattggaccatcggagccggtgcccgtgtgacccagcggctcattgattccggcgtgccattcgacggtgtgattgccttgaacgatcagttggccatcggcgcattgaccgctctgcgcaccgctggttatgaggtgcccgtgcaggtgcaggtcatcggcttcgataacaacgaggaagccccctacctgcagattccgctgaccaccatggattcccgccttgactggacggctcccacggcagtgaatcgcatcctcggacgcatcgacggcagcatcaccaagtccgaactgctcaccaccgaatcccaggtcatcgcccgcgcctccacacgctgaacgacattgctgtaatgctggtgttgctgtactgggccgtacgaggcgttgatacaccggttgaccaacacggcataaagtgctaaggtgacgattgcgtggtacacagctgtaccgcgtggcgcataaggaaaggaagcgccaagcatcactgggcgttcgttctgagcgttcaccattcaaaggagaaaaagcatgcgccgaaataccgcgcttactcgcattatggcatccggcgtggccgccataatgctctgcgcaggaggcacgttcactgtaaacgccgccgaagaagaaccagttaaagccgacgtctcggtcaaggccatccaaggcttaagcgccgatttcatcggcggtatggacgtctcatccatgctctcgctggaagaaagcggcgtcacgttcaagaacgccaatggcgaggtcgaggatttgttcacgttgctcaaggaatccggcgtgaactatgtgcgtctgcgtgtgtggaacgatccgttcaccgcagacggccaaggatatggcggcggcaacgtcaacgccgatcgcgcactgaccatggccaagcgagccacggcagcagggctgaaagtgctggtcgacttccattactccgatttctgggccgaccccagcaagcagcaggtgcccaaggcgtggaaatcctttgaaggcgacgcggacaaaaccgccgacaccgtatacgactacaccaagcagactctgaccacgttcaaacaagccggcgtggacgtcggcatggtgcaggtcggcaacgaaaccactgcgaaaatcgccggcatctccggctgggacggcatgtccaaagtattctccgcaggttccaaagccatacgcgaagtgctccccgaagccaaggtcgtcattcatttcaccaacccggagaaagccggcacctacgccacttacgccaaacagttgagcaaccacaatgtggattacgatgtgttcgccagctcctactacccgttctggcatggcaccaccgaaaacctcaccagcgtgctcaagaacgtggcctccacttataagaaagatgtgatggtggcggaaacgtcgtgggcatacaccttggatgatggcgacgacgattccaacacagtgcccagtaaagtaaccgccgataacctcaagaaatacgacatcagcccgcaaggccaggccgatgagattcgcgcggtcgccgaggccgtgaacaatatcggcgacaatgatggcgatggcgaaaacgacggcctgggtgtgttctactgggagcccgcatgggtgcccgtgggcaccggcggcaaggataacgccgaactggtggatacgtggaacaagtacggtggcggctgggccactgaagcggccggcgaatacgatcccaatgacgccggcctgtactggggcggctcaggtgtcgataaccaagctttgttcgatttcgatggcaaggcgctcgcctctctgccgacgttcaagtacattcacaccggtgccgtcaccgatcatgtgttcaccaagatagatccagtggagattaccgcgactgactcggattccatcgacgcgatcaaagcgcaattgccgagtgaggtggccgcacactatcaggatggggtggacgagaccgaaaccgtgacctggcaatccgctgcgcttgactggattcgtggcgcaggcacatacaccatcaccggcaccaccaacgctggccacgacgtgaccgtcgccgtcaccgtcaccgccactcccgccaaggattacgtaacggacggcagcttcgagaacgctgagaacgataagaactggaccattgccggcaccggtgcgtccatcaccgaagacagtggcaacgccgccgacggcaagcgcgcgctgaagttttgggcatccgatgcctacagtttctccgccacgcagaccatcaccggactcgagcctggcgaatacgtgctgaccgccatgagccaaggcgcggcagcggacaacgccgctattaccgatggtgtggccctctccgccacaacgggtggcaagaccacgtccgatgcgctggaactcaacggttgggttaagttcgataccgccaccgtgcctgtcaccgtgggtgctgatggcacggcgaccatcaccatcacgggcaacctgcctgccgacgcatggggcaatgtggacaaggtctcactcgtcaaaaagaccgaaactccggtgaagccatccacggagaacctggacaaggccgtggccgaagccgggaaaaccaatcgcgatgagtacaccaacgagtcgctcgccaaactcgatcaggcgcttgccgccgctgacgtgctgcttgccggcagcacctacaccgagcaggacgtgaacgatgtgatcaagcttgttgccgatgccattgccggcctcgcccaaaaggaggtctccagcctgaccgtcacgccaagcaaaaccacctatcaggtgggcgatgccatcgatgccgaccatgatctcaaggtcgtgggcaactattccgcaggcatgggcaacgtgacgctttccgccgaccagttcacgctcgattacgatttctccgctcccgctgatgcggcgaaggttaccgtaacgctcaagtcgaatccgaatgtcaccgaaacctatacggttgcggttaccgctcgggccgaaggtggttccggcaacggctcggacggtgcgggtaatggcggggctactatcaatcccgatacgggcgagggcgataagaccaacggtgcgaatggcgacaagatcactggtgtgctgagcaataccggtagcgcggtgactgccgtgggtcttgcggttgtcgttctcggcgtggccggcggggtctcgcttgctttgcgtcgtaagcgctcctgatagagactgatgcggcattatgatgcggttgccggcagccggcaaccggctgccagatgccatctgtcggctgtcgtttatcggttgtcggctgtcagatgcgtctgtctcggcgcagcgatgcgattctgtcccggttcgtgcatcaatcgtttgatgtgggtaccaggacagaaatcactgtcctggtttgcgaaaacgggtgtttttcgcgtaccgggacaattcccgttgccccggtttgcacgtcaatcgttctacgtgagaaccgggacagtatgttgatttcgggattggctgtattccgccgattctgtttgtcggggtatgtggactttggggattgtcttgtcctggttctcgaaaatggcccgaaattgcgtaccgggacaacgatttctgccccggtgcaaacgtcaatcgattgacgcctgtaccggggcaaattcgcgcccgggaacaatagggcgagggccggtcgcaggagtagagcgtgatgttgtcatgattgcgcccggctctcccacacggaaggccgggcgcaatcatgccgtttggttgcagcacccgcacatcgcctgcataaccgtgtacagtggcgtgtagttgcagtacatgaaggagcatcacaagccatgaccaacggacacatcaaccccgccaacgtgccggacatcgccttggaagacggccattccattccgcaggtcggtctcggcgtgctacgtatcgatgacgagggcgtggtccccgtcgtcgaatccgcgttggaagccggttaccgccacatcgacggtgcggccggctacaacaacgaggccggcgtgggccgcgcgctcgccgcctccggatacaacaagggagccaagcgtgaaaccctgtgggtcaccaccaagctacgcgactcccagcagggctacgactccgcgctcaaggcattcgacaactcgctgaaactcctccagctcgattacgtggacatgtacatgatccattggcccacgccgttcgactggcgcagcaccgacacctggaaggcgttcgtcaagctgcgcgacgaaggcatggcccgcacgctcggcgtatgcaacttcatgcccgccgatctgaagcgtctgcacgaggagaccggcgcatggccggccgtcaatcagattgagctgcaccccacgtggcagcagcgcgaagtggtggcgttctgcaaggagcacggcatcgccgtggaggcctactcgccgatggcgcgtggcgccgacctcaacgccggcgacggcaccatcgagaagatcgccgccgcccatgaggtcagcccggcccaggtgattctgcgttggcacatcgaaaacggcacgatcatcatccccaagtccgtgcatgctgaccgccagaaggagaatctcaacctgttcggcttcgccctgaccgccgatgaacacgctgccatcgacgccctcgacggccccacccgcgccggccacgaccctctcaccttcacctatgcgtgattgatggcacgtcgtaacgcccacttccgccgtcgtttcaacgcctctggaccgctggagcgcgtgctgattctcatcgttctcgccgtagcaatcggcgtgaccatcggcctgttactgccgcaggtcagctccgacgcggccaaaatcaccggtggctacactgccaccggttcagccgccgacactttgaacgcgctcgccgtagacgacaaccaaagctcctccggctacgaccgcgattccttcggtttccgcaccaccgacgccgacggcaatggctgcgacgtacgtgacgacgtgctcgcccgcgatctcacggacatcacctacaaatacgccggttcctgtgtggtcgagtccggcacgctggccgatccgtacaccgctcagaccatccattttgtacgtggccgcgccaccagcgccaaagtgcagatcgaccatgtggtggcccttgaaaacgcttggcaatccggtgcgcgcgactggtccactgccaaacgccatgaattcggcaatgacccctacaacctgctggccgtcgacggcccggccaatcaggagaagggttcggcttccgccgcctactggctacccaccaacgccgactaccgttgcgactacgtggcccgccagattggcgtcaaagacaagtaccagctcaccgtcacctcccaagaaaaggacgccatgctcgccgtcctccacacctgcccaggccaggccgtgcccgcagacgaataggggctaccgctcaggattgttgagcataggtgcctgcccctcgtcataagcgcgcaggagccgtcggagcaaaaatgtggtgaagtatggtgcggtgaacacgtgttcgctgctaccgatattgccggcggatagtttcacgccgaactgaatttccggataagaatccgaagcgattagcgtccgcatggatttggcggtgccttttttcgatttcacctccaccggcaccagccattcgcgcgtgcggacgaagaaatcctgttccagtgtggaatcctcttttttgtagtagtacaggtcatagccggatttccgtagcgcttcagagacgatgctctcgtacatagcacccttatagacaccaagattacgattggcccgcagatcatcactggcctcgtcgtcaagcatcgctacgaacagaccggtatcgccgaaatatatcttgaacttgttttcgtcataattgcctttcaacggcagttcaggataggacatacatcggcagatattcaccattcccgaggtttcaagccattccacgcatcctcgatagtctttgaaacgcgctccgctggcaaccttgctgatttggaacttcttgttttccttggcgagttgcacgggaatatggttgaacacgttgagaattcgtgcctgatcgggtccttgcgcgtatttgcggatatcctcctggtagtccaaaataagctggcgctgcaattgcagtgttccctcgaacgtgctagtgcgtatatgggaggcgacaaccgcaggcatgccgccaagcacgcagtaatccataaatgccgtggagaagacgttcatttccacttcagagaatggcgtagcatcacacaggtgggtgaacatgctttcgatgacggcctcatcgtatccgcgagcccacagaaattcttcgaagtccaacgatcgcatttcgtagtcggtcttatatcccacgctattgctttcgatttgcttatagctgatgcccaacattgaaccgctgcaaatcacatcatatttgccgtcgattttaaagaacttcagtgcagtggcgatatcaggatgggcctggatttcgtcgaaaaagatgagcgtatcgcccggaatgaactttttggctgggtcgatcagggaaatattgcggacgatggtattcgcgccataaccgtccgcagtgattgcacgatatttcggttcctcaacgaagttgatttccactaccgaacggtagttgtgtgcggcaaagtaatcgatagtctctgtcttgcctacttgacgagggcccttgatgattagcggggagcgattcgggtcggatttccatgcattgagataggcatcggctttgcgtttgagatacatgaggagcccctttccgaattactgctatatcaatgattttacactttcatgagcgagttttctaccgtctggcacatttcatgagcgagttttcggcggtttttcacatttcatgagcgagatggcgggaaatgccagctgccagtccgccggtcatccatcaatcgtccgcagattgtccgtctgttgactcgggaaacaggcctgcgctataactgtgcgcggtatgaagggaactggtacaaacgatatggcagtaacacacaccgcagcagatgccactgcagcaaccactatgacgaacgccgtggcagacatcgaacaggaaacaccggaaatcgagaaggaacgccagcttgccggagtcggagccggagctggaaccgtggcaaacggcaagaaaaagccgcatgaccatgcgctggccagcatcctcggccccgcgttcgtggcggccgtggcctacgtcgatcctggcaacgtggcggccaacatcacctccggcgcgcgatatggctacctgttggtgtgggtgctggtgctcgccaacgccatgagcgtgctcatccagtatcagtccgccaaactcggcatcgtgaccaacaaatccttgccggaactgctgggtgaacgtatgagcgatgccggccgcttcatgttctttatgcaggccgaggtcatcgccatcgccaccgatctggccgaggtgatcggcggtgccatcgccctgaacctgctgttcggattgccgctgttcatcggcggtttggtgattggcgcaatctccacggtgatgctgtggttccaaggtggcaagacgcaaaccacgttcgagcgcatcatcatcgtgatgctgctgattatcacattcggcttcatcgcaggcctgttcgtagccccgccgagccccggcgaagtggtcaagggcatgattccacgcttccagggcaccgactcggtgttgatggccgcctcgattctgggcgccaccgtgatgccgcacgccatctacctgcactccacgctggtgaacgaccattacgcaggcggcgaaaagccgtcgatcaaaacgcagctgaaaggctcgaaaatcgatgtggcctgggcgctgttgctggccggcaccgtgaatctggcgatgctggtgctcgccgccaactcgctgcacggcatgtctggcacggactccatcgacggcgcacaacgggcgatcacgcaggtgcttggcccggtgatcggcacgatcttctccatcggcctgctggcttcgtcgctgagctccacatcggttggcacgtacgccggctcggaaatcatgcacggtctgctgcacgttaacgctccgatgtgggcctgccgcgtggtcacgctggtgccggcactgattgtgctgtggttcgccaaggacccgactcaggcgctggtcatcggccaggtggtgctttccattggcatcccgttcgccgtgattccgctgatgcgatacacgcataacaaggaactcatgggcaagtgggctgatggaaccgtcaagcacgtgatttttatgattgtggtggcactgattgtggcgctcaacctgctgctgattgtcctgacgctgatgggcagggcgtaatagactccagctgaaatcctgcgatagcacaacataataagaagccccggtgctggaaccggggcttcttattatgttgagaatggttgaatctgccgtcagttcgcagccatacgccgcgcacgccgttcgcgcagcgcgcgcaaggaaataatgtctcgcgtacgaccggcaccgtcgcccttgacgccgaagaacaccatcaacaccattgccagacagattattgcggagattcgcagcgcccattgaatgccgaaaatcgaagcggcgacggcggaggcgccgccctgcttatgcaaagcggcaaacgtttccatcagaatcaccaacacgggtgcgcccacagcgcccgcaatctgacgcgcggtattcgtcaccgatgatccggcggacacttcgctcggcccgttcaggcaattcagggaccacgtggtaatcggcatcagcaggaaacccatgccgatctgacggatgaactggcagatcgatacccaccagatccacgtatccatcgccaccagcgacatgcccaaggtgccaagggtcaacacaatcgaaccgaacaaagccaccgggcgcgcgccgaaccgatccatcgcgcggccgccgaagaactgggagacgcactggccgatagcgcccggcagcatgatcagaccgctcatcgtggccgaatagccgcggtcagtctggatgtagagcggcatgatgaccagaatcgaactgaatgcaaagaacgccagagatgccgtgatggtgccgacggtaaaggaccgattcttcagtacttcaagatccagcagcggcggctgggggagtgccgactcgtccttggctacggcctcgcgataccgcttgccagcgcgcaggttacgcagcacgaaccagacaatgccgaccagtcccacaaccatcggcccccacgtgaccggtgccgcgaatccataggtctctgaattggtgaagccgaacatcagcccgccaaagccgatcaccgacaggcatgccgagaagaagtccgcgcgggccgaagggtcgtgtgaaccgaaattatgcagtccgaacatggccgccagcagcgagattacgccaatgatggtcatggtcaggaagatcgagcgccagccgttggcatcggtctgccagccgcccaaggtggggccgatggcaggcgccacgctcatggccatgcccaccgtgcccatggcaaacccgcggcgagacagcgggtaaatggagaacacggtgatttgcagcaccggccacatcacgcctgtgccggcagcttcgagcatgcgcccgaccagcacccatacgaagtttggccccaaccatgccagcacggagccgagtgtgaacaccgccatcgagcagatgacgatctggcgggtggagaagcgccgggtcagaaacgcggtcagcggcaccatcacgcccatgaccagctggaacacggaggtgagccactgcccggtggttacggagatgtggaattcggaaacgataatcggcagcgcggaactcagctgcaactgcgtgaagttgcccacgaaggtaataaaggtcaatatcgcgatggagataaacgccgcccggctgagtttgccgtctacatatgattcctcgcggctcagtacccgctgcaattcgccgcgacgattcttgattccctgagctccagtcacacactaccccacttctgttgcccggcctgttgccttggcggtgtcggtggcgcatctgttcagtgatatatgcgcctcgcatatcaatgcgtattcgatgtattcggcgaccgtcgtcttcgcgtgcttggccgagcagcctctcaaagcaccccaatacgctatacccaggggtggtccagtcggttcggaatatgtgcagaagcgggggcgaacacgctttgtgcacaagaccggggcataataggcggttagttattgcaagaggttacaagtcaataagattagttttgggagttagtatgagcgttcatagggcaggtcacgcagcaagtattccacgcagaaggcaccgcatctggccgtgggcggtgtcgatttgatatggcctgatttttgttccgcccttatagtggggcggcttgcgccgcttggtttgcataatactcggtttcggtccgttccggtgtcctgtagcccaaggactggtgcagacgcttcgagtccccgccacgagacccaccggaacgtcgccgattccaggtccctcgaatcctggaagggcttgcgtcgccagacgagctcggtcttgtacgcgccgtcggcgctctcggccatggcgttgtcgtacgagtcgccgaccgtgccggtcgagggaagcatgccgaattccccgatcctggtggtgtacacgaggctgatgtactgcgcgccatggtcggaattaaaccgatgtcggtttaattccgattaagccgggtttgttgttaagccggggaacggttcggggtcttggtggctggccgtgtcccatgtggtttcccggcttaacgttccgggttatttgagggtgtgtagttgtcggagtcgttgctcgctgagccatgtctccttggaggggtcggggccggggttggccgcatcgacggctttgcgcatcatgtcgagggtcgcgaacgcgtagaacgcgctggttgtgctcatgctttcgtggccgagcagttgcatgatgagcggtagcggcacgccctgttggtagaggtccatggcgcgggtccggcggatcaggtggcagtggacgcgttcgggcatggacgggcacgtcccgcggcgtgctctggccgccgcggttttgaggatctcgtcgatccggtccacggagagcggctggatggcgccgttcctcgtcgagtggaacaacggcctgtcgccgtcgcgcatggacggtccgggatggaattcctcgaggtaggcggccaggtgggttcgtgtcctttctcccaggggcacgacccggctcttgccgcgtttgccggtgagcgtgaccctggccggcttatccatacccacgtccgcgatggtcagtgcggcgagttcgccgatcctggcggcggtgtcgtacatgaggatcaggagcatgcggttcctgcgcgatttggcgtcgccggtgccccatgcggtcagcaacgctttggtgtgctcctccccgaggtggtcgacgggtttgcgcgcgggtggtttgacacgtatgccggccgcgtcgttgcccagcgcggtcaatgccgggtgttcgaggcccgcgtggtcgaggaacacgcgcatcgtcgtcatcctcagcatgatggtgcggtccgagtacccgcgctcggtccgcatccattcgacccaccggcccaggcgcgcccggtcgaaatgcccgaaaccgatgtggctgcgctgcgtgccttccgtggtttcgagccatcggacgtaggattccaggccgatgcggtacgcctcgacggtcttcggcgagctgccccgcaccttgggcagccagtggtgcagccagtcgcgcgcgactcgccagaagtccggttcaccggagctggcggccgttttccttgccttgctcatggttcctccgtttccgggaccacgcgttcggcgtcggcgacgaggtccgcgtatccgtccatgaaatcggggctggcgtgcacgtagtagagggtgctgtcgatgccggcgtgtcccatgtaggccgccagatagggcagcatcgccatcacgtccacgccgtcgcgagtccaccgctcgatgttcgcgaacgcgaaccggtgccggaaatcatagggcctgggccgtttgccggcttgtggccactcgagcccggcccgcgtccagacgcggcggaacaccacgccgggcatgcccggggagaccggattgccggtggaggtgacgaagaacgcgggacggtcgtctccgaagcgttcgcgggaccgttggtcgcattccagcagttcggcggcgacctcgtcgcccacgggcagcctgcggctgcgaccggccttggaatcgaccacgtcgatggaacgggccttgtggtcgacgtgcccgacggcgagtctcctgacctctcgggtgcgcagcccgcagcaggccatgagcatgaagaacgcgcgagactgccacgcccacggcgacggagactccaacgttcccgcggcccgcaggaacagggcggcctcgcggtccgtcagcaggtacggcgtcggacgcggggatccggccttccactggtcggagagcacgtacgcgtcgggatcgtgggccagtcgcatccacctgccgaagtccctgatgtacgagaaccacgagcggcaacccccgggattcgcgtcgatcctatgggcgatccatcgctccacgacgccccgctccagacgcacggccccgtgttcgaggcaatgccggtcgaacgagcgcaggacctggacgcgggtggcgccatgcctgcccatggacgccttgaagcggatgtactcctccaattcgccggcgagcgggccgacgaatccgtgttccgtgggtctcatgacgatccgccttccggcacgggcagcacgcacgcgagcattcccccgcggtgcgtggccatgtagacgcgtgtggaatcggggtcggcgtggccaagcaccgcgctgatcgtcggcaacggcgtggccgcctccagcatcctcgtcgccgcgttgcgccgcaacagcctggaaccgccccggcgtccgagcccggcgtgccgcatgacacggctgatcgcctcgtacaccgatgaatgaccccgaagcgcgacatggggcgccttgtaccgcacgaacacacggtcgtcgtcggtggcgggcctttcgtccaacagccaggacgccagcctcgcggccagcggtcccgtcatcggcacggtcaacggattgcccgtctttcgctgcaccagacctatgctcatggaatcccaatccacgtcggcgatcctcagaccgatcacatcgcatgccctcagcccgcacgtcagcgacagcagggtgatcgccgcgtccctcgacggcaccgaccgcgaggcgcacgcctccagcaagcggcggtgctcgtcgtcgggcaacgttcccgcgatcgcgtgggtcctgcgtatgccggccaggccgatcgcgtccgccaggtcatcccgcccgagccatctgaacaacgggcgcaggtccgacgcggcgtgccgcatcgacgactccgaccagcgtgaacgcagcccggccaggaaccccagcacatgcgagccatccgaaccgtccaacgacacgaccccatgagattccagccacgtgaggaacaagcccgccatccgacggtaatgccccaccgtcgccgaagccagtcccgaaccggcgagatacgcctcccaacgctccatgaccacggccaaacccggaaccaccggctccgcaagcctgctcctgcgccacttgcccaggtccaccgaaccggaccgcagatacgagtcgcacaaacgcgccagcctgccgtaatcgaaccaccgctgcctgctgaaaccgcccgtccgctcactgaaggtcgacgcggcgaaccccgcgcccaacccacgcgtgtacaccgcatccgggcctccggcgtaccgttccaacgccctgatggacttgcggtactggcctatggtggattccatataaccggccccgtaaagcgcgcggaccacctcgcccgcgacatggccaaccgtcgtctcacccatggcaaactccttcgttcgaatcaaatgggacaagacgaacataacccggaacgttaagccgggaaaccacatgggacacggccagccaccaagaccccgaaccgttccccggcttaacaacaaacccggcttaatcggaatggtgcacgagaccgtccgtgccgccatgcggggcggcccatgatatcgcctgttccagcgcctgcagcggcagctccctggtgtccatggtggtggcgcacgcccatccgacgatcctgcgggcgaacacgtcggtgacgaacgccgtgtagccgaacgagccgttggccatgcgcacgtaggtgatgtcggccacgtgcagccggttcggcgcctccgcctcgaacccgcgttccacgaggtcgggcctgccgcccgtgcccttcgccggtttggtggtgacgggcgtcctgccgcagcgcacgccgcggattcccgattcccgcatgacgttcatcacctggtcgcggccgatctcggccggatcccagccccgcgccaacaaccgggcgtgcgtcttgcggtacccgtacacggccatgaagaaatcggcatggatctcgaggatgtcgcgggccagcgcctcgtgcctggcggccatgcggctgacgggcctggatttgaacatgcggtagccgcgcggcgtgacgagcccgcagtccagcgaagcggccagcaccctgcagatcggcccgaccctgaaacggtccttgaattcgtcgatgtaagcggccatcaacgccgtgtcgggtcgagccgtgccgcgaaaaaagccgacgccgtcgtcaatatctcgttcgcccgcctcaatcgcgcgacctcggcccgcaaactcttcaactccgccatcgcgtcttcggccgaccgcttggtctccgccgcgaccgtggcgtccgtcttgttgcgccaacggcgcagcgtctccggcgcggcccccggatccttggcgacctgttcgatcgccttggtctccgacgaatacgagccgcgcgactcggtcaacagcctgacggccttcgccttgaactccggcgtgtatctcgttccttttgtcatggttccatcatctcccatcgagttagggggaaatgcggaacaaaaatcagttcatatcacacaggctgagggagagacaaaagaagggcgtcagcaagaagctgacgccctctcaacatttcaacattcccaaagaaaactcagtacgatccagtccccttaaacactgccaccacagtcttcaacagaatcacgatgtcccccgtgatagaccagtcctgaatatacgacacatccgcatactccgactgttcctgagtcaaatcgctgcgtccggaaatctgccacggtccagtaataccaggcttaaccagcagtctcgtggaatacagcatgtcatatcgcgcgacttcttcaggcagcggcgggcgaggcccaaccaagctcatatcgcccttgaacacgttaaagaactgcgggaactcatccagcgatgttttacgaataaagtgaccgatcttagtcacgcgtggatcgtccttgagcttgaagataaaacgatcctcaatgccgcgttccttagccagtttcgccttgatctcgtcggcatcagtgcgcatggaacggaacttgtacatggtaaacggcttgccgtaaatgccgatgcgcgtctgcgaatagaacacagggccgccgtcttcccgcttgaccttgtatgccacccatagcatgatgggcgagctcaagataatggcgataccggaaagcacgatatcgcacacacgcttgaggatgcgggtaacggttgagtactgcgtcagtcgtgcaatgactactggcatcgtcggatcgttgcggaaatgcaggtcagcgccgctcaaatcagccacagaggtagtgagggccaattcaatgcccatggattccacggccagggacaatgtacgcatggtctcagaatcacgggtaagtacatcagctaccaatacggtacgtgccttcatacgcttcgcggtttgcggcaaatgcgagttgagtggcaacaccttcagtcgtgcctcagcatcgttggcaggagtgaagagcaccgacaccaaatgctgcgccgaatccgggtcatcctcgttcttgactgaagccactgggcacaccgcaattggcgcgtagccgaggccacggcactggcgcaattgttcgaccgtccggtggataccttccggagacccaataaccacagtcgggtagttgaattcgccattcatgcggttgcggtgcagcgcgcggcgcataatccaacgctcgataataaccaacaccagtgaaaccagcggaatgaacacattcaacgaccggggaagattgaggtggaacaggtaccccaacgtgcacagcataatgaaatcgatgaacgcagcgttcaacagcttggcgtacagggcatagccctcacccatggtgtgccgttcataggagcgtgcggaatgcagactgatgagccacgatacgcaggccaacagcaggaagctaaaaacgccgtattcgccgggaccaatgctctgcacataggtataagcgaaaggtcggagcaggaacacgatgtacgtggccacaatggtcatcagcagatcaagcacgaccaaggtcgtgttatagagatatcgccacttcggcacagaatggcccatcaatggacgtatgttcgtggtgtcgttatgtgtggagctgccgtccggtgtagaggagaagtaggtgccgtcaaagaatgtcggcgcaatgtcacattcggcaacgggggagaacgaagccgaggaccggctcccgctcacccgtactttgggcattgccatggtcgcggtgcttgttgcctgcgactctgctgctgtgtctctgcccttcgacatgatactgaattcttcctccatcgttccccaaaaatcgcaaggaacattcattctctcgcccaccctagcacgaatgctacccccccccctatagcaaaatccgcccaaaaagcgaatcccttgtaacattcatgtgaagatgaagtggtggtgggcggacgaggattggccgcagtccggtgtatcggactagaatgggacgctagtggtttgtacgcaggcccgcaaggtagcgttgtaagtatgaagaaggactgagcccatgcacattatgttcgtctgcaccggcaatatttgtcgttctcctatgggcgagctattgctcactcgctacctctctggcaccacggtgcaggtttccagcgcgggtacgcatggtttgcccatgcatcagattgatcccaacagcgccctgcttatggaaagcgtgggaatcgaaccgagtgggttccgttctcggcgtctgacgcagccgatggccaagtccgctgatctgatcctgtgctttgaaaaggatcagcgtaaagacatcgtcacgttggctcccaccgctgtgaaatacacgttcctattgggtgacttcgccaacatgtgcgagtactgcgcgcgcaacgggctggtcaagggcttgaccattcaggaacgcttgcagtcagtgattgactctgcttccattattcggcccatgcttcccgaacccgaggatattgaggatccgcacggtaaggaatatgcaaaattccgcactgccgccgagcagacaaacaaggcgctgcgcaccatcctgaccagcatgcgtaagcactaccgcgttgaggaagctccggtgcgccctcaaatcacgcggcagtatgcttacacggtctgacatcaagctgacgtaagacgtaagtattcacgtcattctcacgccggtttcatctcccgatacgatttgtccgttacagtggcatgctgttgggtgatgacagtgggagtaatgagtgactgattctaatattgccggcatcgccgaggcggatttcgggaaagccggcgtctcgtttgataatgatcgaccgatattggtcgattcctcagtttttttgttctatgcggcgctcgccatgctgccgattgacggcacagtagcaggcccatacatgccgttttggacgccgctttctccgtggttgtttatggcatatgcggtagcgaactggcgtttgctgccgcaggtttggcaccgtttccgcgcattcttcctgtttccggtgctgttaatcgcgctgtctgcagtggattggtgtctggtagcattccatcggcttccggcgctggtgtcgctggccggcgtggctggggctctcgcctgcctgtgtgcgttggacatggcattacgtatcaagcgcttgtcttggcggcgcatgttggatctgctgattctcgtatattggttcgccttcgcagtcggcgtggtgcagcggttgtcaatcatgtttgattggacttccgtaaagaacttcttcattcatctgatgagccgccagtacatcagcagcacttcgcattggggcggtggccgcccgcagtttctgttcgcagaaccgagctatataggtatgcacctgttcggtgtgctgctgccgctgatctggctggtgcgtggtcgtgaccacaagcgtgcaaaccaactgcgcgtccttatcatggtattcgctgcaggctcggtgctcatgggtgcaggcgtgcgcatcattcttgactcgattatcgcgttggtgtttgtgattatcgagatgaacagttggcacacgtggcgcggccggcttgtggcgttcggggaactggtggtcacggtcggtctcggcgcatgcagcgtggcagtgaaccatcggttgagctccatagccgagcttggctttgacggtgacggttcgttctatgcccgtttatggcagtcactgggaccaggtgcgggtgcgttgaagcatccaaagcagttgttgctcggctatggcgcaggcaatctatccgatgccacccatcagggtgccgataccgcagtgcggtctctggaacgtctgggcctgaacgcttcggcaccgaagggctggtacgcacaagtgacaccagcaaacatgttcacgatgagcgcctacaccagctttttcgtggagttcggcctgattgcttctgtaattctcgtggtactagtgctgcggtggattagccataaccatgcctggaacaagaccactgtctgctggctgctgttgaccatatacctgtatgtgcagttcgaaggatatgccttttatgcccttccactactcctatgggcagtggctgccgtgccaaggcttaaatcaaaacgagaattctgatgactcatatatttggagtattccgatcatggtgattgtgcattggcttatttcggcggtttactcgaagttattcttgctcgtgtgaagaatagcctcattcccggattcaatttgtaagtgcgacgctcgtctttgggtggcttgtcttcggcattagcttgccgagctcgcggtaccaaacctcgttgggcgtttcccagtccaggaccttcatggggtgtcgttgatctcctggacgatggcctgcaggtcctcgtccgtcaggtcgtcgaagctggttctcttgggcaggtagcggcggatgcgcccgttgcggttctcgttcgtgccgcgctggtgtgaggagtaggggtccgcatagtaggtgagcatgcccaacgcctcgtccacgagcaggtggcaggaggattcggtgccgctgtcccaggtccggtcgatgcgcgcgggcgcggggatgtccttgtggatgtcgtattcggcgcgcgcggtcgccggcgcgcccttgtcggggatgaaccgggcggacagcctgcggctcttgcgttcgacctgcgtgtcgatgcgccgcttggacggggacgcgccgaccacggtgtcggattcgaagtggccgaactcatggcgcgagtccaccttcttcggccggtccgtgatcggcacgcgcatcgggatgcgcggccccctcgccctcctgcccttcgaacgcgtgcggtgccgcttgccgcgaggcaggtactgcctgaggtccaacgccctctgcggtttcgcgtggatccactggtggaggcacgcgtggctgatcctcatatgcgggtcgtcgggccattcgaccttcagtcgcccctcgatcctttccggcgtccaccccttcctgagcgcgtccatgacccatgcgggcaacggggagtacgctatgcgcatgggcttgcgcggctggcgggcgcgttgttcggccttcctctgcgcggtcatggccgagtagaacggacgggacgtccacgcgcccgtcttcagccgtttcggcctgtagggccggtaggactcgttctcgtcggactgtgttttagcaagttggcgtccgctttgtgagcggtgtttttccgcagtgtaggcagcgggttttccgcagggtgtgcggtatcggccgctgcctgtctgcgttgtgttggttatttggtcatgagggcgtgttcgcttcggtaggagcggccctcgaatctgatgagccgtccgtggtggacggtgcggtcgatgagggcggcggccatgttcttgtcgccgagcacgcgtccccatccgctgaattcgatgttggtggtgtagatgatgctccttgtctcgtaggaatcggaaatgatctggaagaggagcctgctgccctcctcgtctatgggcaggtagccgaactcgtcgatgatgagaagtcgggccttgccgatgctcgcgagttcccggtcgagccggttctcctgctgggcgcggcgcagacgcatgagcagtccggtcgcggtgaagaagcgcaccgggacgccccgctcgcaggcgagccgtccgatcgcgatggccaggtggctcttgccggtgccgacgggcccgtagagcacgaggtcctcgcatccggcgacgaagtcgaggttctcgagctgcgcgcgcccccagtcggcgggcatcttcaggttggtccagtcatagccgtcgagggtcttgtcggcggggaagccggcctgtttgagcaggcgcaggcgtttggatcgctcgcgcgagtcgagttcggccgtgaaccatcgttcgatgaagtcgagctggttgggcgtggcctcggcgagcgtgccggcgagcacgctgcgtgtcagggtcaggctgcggctcatcttcaggatgcgttcgcttttctcggtcgtggacgcgcgcctgcgtcgggtctccgggatcaccggatcgggtctgacgctcaccgttcttcccctccgtcgtccgtgccggtgatgaaccggtcgtagccgctcaggtcgggctcctcgatcccgccggggtattcccactcgccgtcgcgcatgcgcaacgcgatcggggtgagcgagtccgcgtgcaggcccatgtccctgttcgagcgcaggatctcgccgcacgcctgcatcgcgggatcgaacccggccgcccggcacgcgtccccgatcgctttgaggctctccctcaacgtcttttcgtccatggaatcaagccacgcgcgtatatcgtcgggcacgtccgggcggatcgagctttcccgccacgcgcggggtttgaccgcgagccggggaagcacgagcgcgggatcctccacattgcgcgaccgtccgtactgtctgggatactccgcgaagagctcgccggtggcgggcgatgcgagcgtgaccgtgtcccaccggatcgcggccagcaccttggaacgcgccgaatcggggccggcgaggtaccggttcgagtcgatgtcgaccagcccgtacttgtcggccgtccggctttcccagcgaaccgggtcgaacgccgtggacggcaacggcatcaacgcggccctctcctcgtcgaacacctcggccacgggcacgcccggcaacctcgggcaatacgagtccctggcgagcccgtcgcaccgctcaagcatgaaacgactgagctgcccgtaggattccgcgcgcatgggcggcaccatgagattgcgccgcaaaaacccgaccgcgttctccacgctgcccttctcgttgcccgaatacgggttgcagaaccggacctcgagccggtaatgcgccacgaacgcggagaacaccccggtcaacgcgacctcgcccttcgcgttgcgccggccggcaccggtcgcgttgtccatcacgatcacgggaggaacacccccgatatgctcgaacacgagcatcaggccatggcacagacactccgcgttctcgcccggcaacgccacgcacaaccgcatgttcgaatacggcaacgagaccaccaggcaatgcacgtccgccatctcgccagcgatccgggcccgggccacgccgaaatcgacctgcatgctgcccgccgcccactcgagccgcacgtacccctcgcgatccggcacgccgcggttcgcctcgcgccaccggtgcacgtaacgcatcgtggtcgaatactcgccgtcgtagtccgtctccgccagcagacggtcgtgcacgcgcctgatcgtgtgccgctgcttcctgggcagcagacgatcggcctccagccacccgtccaccagatgcgcgtacgggtcgatcttcgacccgtacctgcgatccgccttcggcttgggcgagcaatcctccatatccgcgtacttcgcgaccgtcccgcgatccacgtgaagacgccgcgctatctgcgcgcgcgacattccctgccggtcgagtctcctgatatcttgcacaatgggcatcggtatcgccatgttcctttccttcccgagcgccggccggcggcaaccggccgaatcaaaaccgaatcgcaactcgggaatatacaggcggcggcaccgatgcctctcacatcaccgggaaacgatgacgacaccggggaaaaccatcagcccacactacggaaaaacactgccgaacctgtcgaacaaacattgaagcaaaacaggcggtctcatgggccgcgtcccatggtggcgcggatggtcttatccaccacagcgatcatggcacgcagtgcatcggcacggtgtacaccaccagggttatggaatatgggatgctgccgtcgaccggcaccgtcggcgactcgtgtgacaacgccatggccgaaagcgccgacggcgcgtacaggaccgagctggtatggcggcgcaaacccttcgcggatctgaaggacctggaattggcgacgttccggtgggtctcgtggcggggactcgaagcgcctgcaccggtccctgggctacagggcacccgaagcggtggaaaccgagtattatcaacatcaagcggcacaagccgcctcactataagggcggaacaaaaatcaggccacttcatgacgtggagtgttgcggatagtgtccgggaattatgtactctgatcactatccagaaactatttctgggttgattctattcgacaatctcttatccaattctgttaggcaaaatggaatcaacctcaccttccttaaaagtttgttcttcgtccttttttaaagctttctgtgctgctctgtaacttttgctatcagttgctggataattattattgacttctgacactttcttacataggacatctctctgatgtcgtatgtcatcattttcaagtatgtcatagtcagttaacaaagaaacataactttctctaatatcccatagtgcgtttgctgcgtttctatgctgatttatttcatcctgaattttatattcttttgtataaatattcaggaataacgacaatacggaaaaggttccacttaaccatgctaatgcatttttatttgttataatgcttgcaaagaatccgcatgatgaaaatgctgtcaatgcaatctgtatgttctttacacgcctgtttttattttcaagtcggtcggctaatttgtgatgtgcggtatacgtataggtgacttttccgtaagcgtcctttatctgattttttaattgatttctatagtttgtatcattcattttatattttcttatgccattttattaagaattttaccgagaatgttccagtcttttgaggtatcaagtgccgttccgcttccaggggcggccaaggttggtgataataggccgtttaatgaaatctgattataatggtcaagtaattcctgttcataagatttcaactggattgaggaatcgacatcttcacgtgtaaaatgccaccatcctattgcatcatatacaaatgaatctattaatattccggacaaatggtagcttgaataggaagcatccctgatcatccttatgtgcctacatgtcgcgcacagcaaaccgttagatgaattattcttctctcggattgccctttgctcagacctaggatcagttgtcttccaattccctcccatattgctatccggatatttgtataaaatactgccgctccagttttcctgtgggaatgcaggtaacacttcgaatttcattccatcagaaaaagcgattttaatgacttgaccatccgctctaacatcacttcttgaatatgtattttgaattgcgttctttactgcctgcagaagtcgagactgtccatttcctttaacatacgaatatcgattatactcgtcttccgggatttcgacgagtatatctatatcgcttgtatctattgctgtattccttccgtaagaaccgacgtagagactatgtgcagtttcactggtggaattccagaattcttgatttatcgctcgagtgactctatggtatctttttgcaatgctttggcgtgtctctaaggaaataatattatcgtatcgaattacttttgaactcatgtcatctttcctttaaatatgctcatgtgtttattatttggactcatttaaaatagaatacctatctcgttagccaatctcctcttctgggtctgctaacatttcaaggatatcgtatagagttggttttggcatttctatcatatggaaatagtcagggggcaatcagggaaataagagtgtagcacttgatagattgatgaatgaagacgttccctgaaaacaagttttgctgcgcttgtcatatcataatagcagtcgggatgaatgctgtacattttaagcaaactcgcgattaaattgtcgtagtcgacctcgtcaggtaaatgttgcgagtaagggtggtgtgtgggatttaagaatatttctttatattttctccgtatttcctcatcattgagttggtcatagaataaatcaaactcgcccattagatatgcggtgtcaacgttaagggcccgtgcaagcttgtctaacagttctggagtgattaatccatccttgcaacttttgcgaatcgttctttcattgacatcgatttcttctgcgatgctgcgataactacgttttttgcctgatgctttgcgtgcatcttctagtctctgtggattaaactggattttgctacggatctttgtcatggttgctctccctatacggacattttaacgcatacaggcccactttttgtagacgtctaaaaacgggttaggatgctgaatgccaacaaggtaaggagataggatgataaatcctggattgatggcgtataacgttttagagcaaagagcaaaggctgtgggcgggccaaatgcattttgcgatttgctctacagacaagggcttgagaagggtatttctattggggaaaagactggctgtactcggaatcttctcgttggactgatagctggaggactcttgggcggtgtttcatctttctgcctccagggaattactgggcttcgatcgaattccactgaccatgcagaggccgataagtcttttgagaataatgattctggggatagagaagaatgaagagttggctggaatgattcttttctgctcaaaatttttagtataaacttaaatgaatatttctcgacgaggaggattaaaatggtattaatttatcgaacccggagttggagtggatgggggaagcataaccactattggaatgagtatcgattggaaggagacaaggttacaaaagtcaaatgtcatcgtcagaaattctttgatggtaaagagaatacttgggaggaagatgaagaggaacaagattcttggtctgttgggagttccaatcttcctgattggctgaaacgtttcctttgagtctgagagcagtgtctcatgataacgtctatggctctgcagcgatggctttgcttaggaaaggaagattgggtatgcctaccaagacacaaatgaaacgtgaaatcgtgagtcgatctgctctcagtctacttgctgcggggatccagttcattgagattccacggacttatccgacattcgacaatgcattcaaccatgcgtttaagaaatgtgggttggatagggtttacccgcatgttttcggactagtctattcggatccgcaggatttgattgataattcaatcacacacacaggctatgaaatcccgtttgcaaggtggcgcagggagattcatgagggcaggcgtcgttatgaactttatctcactgatgacgcagaccaggatcggcttgagcggggcgatgatccccagagcatagttaaggaaattatttctcaagactatggatctgacgatgcctcaccttttgcagtgtggccatggactgatttcggcaaggtgatgagcaatgagttaattgccgaatattgcgctgtatcctgtcaggggcgcagaatccaagcaaagttagggctgagggcagtgtggtttgtgccgaacctgacacgctttgctcttccatgagtttgtgtgcttgcgtcgggaagagctcgttgatgggggcatgcgcaccgtacagcgcgcacagggactgcccatcgcgatcgtggaggagatcgcctacgagaacggctggatcacgcgcgagcagctcatggagtccacggaacgctacggcaagagcccctatggccagcatttgaagggcctcgccgacggcgagatcatgctcgtgccgaatcagaagaactgacgtgatgaggcgtcttcaaagcgcctcatcacgtcagttcttcttaccagtatgccctagccccgttgtcccagatatccgttttcccatattcaagtgcagtaatgatgtcttgattcaacttgctacgtaggtcatcacagattttcgtttggaatagtggaatgaagcacatgtcccatgtgaatttatggctatccggatcagggcaaaacaatattgctgtggactgaaccgcttggagaaattgcttcgtctgggatttgtactccatcagtaggatgtaaacgtccttgctgatatccagtaaaatcctggtgagcagatcacttgagatggagtctccatcagtgtatcgtttttggctttcctcatcatcgttttcctgccgtgatttgcgtgctgcgactgcgttttttccatgccttttccgcgatgggccgaatcctagtgagttacgtcgtgagagagcgaatgctgctttgcaggcattgataaaggtatcttcatccggaatcgtatctgcggcttcgctgagtgcgaatgcaatagaggctacaatgtcgcaaagaacatgtgcttgggacaagtactcgccggctttagaggctaaatctttgaaagaattaatgccatgattttgtacacaagtgcagagttttgatacttgctggcttgctagggggttttctcttgcccaacggagtatgtcaatgactcggcaatagtcaatgatgggatgagacacatcctcgcaaaggaaaaacacgcgtttaggctgtttctgtgcgtggataattgttgttaccttatcatgcggaatatcggcaatgcgagcttgaaccgtttggactttgttggcaagagcctgcttgtatttgtcaggcaacttcttactgttttcgggagtaagaaccattctgagtaattgggcgtgtgcgatacctgcgcatgaacagacacagttgaatccatttgcgaatgtgcagctaccttgacctcgtccagtgtgaatatctatgcaagggtctttgggatttacttggatgggcagtgccatgtttcttctttcagctctgtttattagatttcagcgtctcaatcactttcggcatatcggtccaaggggcgtattcctgctcgtgatatggcgtgagcctgttgcgcccctgactgttctccgctgtgttgtgccgggctgcgttgcgtgtggcggcatcgagatgttcgctgtcgatgagttcgtcattgacgtatttgttgcgattccctccaacgatgccggcttttgccgcagctgactcgacatcgggcgtcagtgtgtagcttggtggacaagccttcatatggtcgagcagccagacctcgaagcagggattggaaatgatgagctcgatcccattgtccttgcaagtttttgcggccttgctgtggtcgtgaaagtcgtcaacatcgactaccgcccagattttttcatagcaatctgtggagatatcccgttcatcctctttcttcaacttgcatgcaaaatccgcgagctgttcaggactttcgttcttctgttggtagtcgatgacaacgtcatatatggactcgagctgcttgaaatactgtctttcggtaacagctccgccagctacgacaagataacgcttcttgcgtgccctgtggaaacgtgcagactcgcgaccatgcgcgggaacgcctcgcttcttcgccatcagtcatcgtctccattcatgatctgtgcgaatacggtatggaaactggggttcggtgtggcgccatatacaccattgaggtagttcttgccgatgttctcttcctttcgaataccaagttccgttaccgggaagagttccgaggcgccgtctttatctttctctacaagccatatctgatcgggttgtagtaggcggttcgacgaacccgaatgattgatcaatgacacgtcatgggtcgtgaaaatgagctgggagccgtggggattcgttgccggatcggtgtacagcgccaccagctctgctaccaaggctgggtgcaggcttgtgtcaatttcgtcgataagtgtgaccgtgggccttgatagctgacgaagggcaagcgagaagaacgacagcgcggcgacggtgcccctggactcgttatccaagccgaagccggcagaggacgaatcttcgccggtatgagtgaattgcaactgtgtcgcgtttttgatgttgaatgcttcctctagctttccctcatcagctccgatctgagtcttcatctgctctttgaactgatgccagatatccgaggggatgttcgccggaacgcttttcacatcgctgatgccaaaatctgcgtacttgatcagagatgtcagatgcttcgaaaaaggtgtcttgttcttgaattggtcaagcaatatgggctgttcctgttcgaaagcgtttgccacgcaatacgccacatcattctggaaaaacgagaatacaggttggacacattcgatgccggctgcggcggccgccgaaagcaggagagcgttggggcggagtcccactgtctttcgcacttgcgttctaggtcctttgaaagtggctccgaatttcacctcgtcgtttccggtgcgggagaacaacagtgaggagtgagtggagagacgtcctcccatgtccttaaagaaggtaagctcttcctctaatatgtgcttattgttatagcggaaccagtactggtatttcagatggttctcggctgtgaactccaggaagaacatcgatggttcctcgaatgggttctctctcagtaggaatggttccctaagaatatcgctgttcgcatcaccttggctgtagctgtttgtcaccatgctacgcatggcgcacatcgccttcaggaaattggtttttcctgatgcgttggctccgtatatggctgtgattggagactgccgtgagtcgttggattccgtgaacctttcgtcgcgagtcatagagaaagattgctcgtcgcggaaactcctgaaattcgaaaagctaaaatcaatcagcattgggtcgcctcgtaaatgtgttttactcttttgatgctgagattataactagaaatgtccatttttgcaattttctgctaaaagtgatgattttatgagcgtgtccacaaatctatacatttcctggtttcacttggcataagaaggtgcaacctgtgccttacgtgtgcgattttcatttcagaattgtttattttccgtggaagcggtgagattggcttgcgtgttcaggcgaaaggattgattgggtggatgccttgtcccacagcaggtcaaaccagtgtccgcgccgcttgccgatggtgacggcgaatagtgcttggcggatgaagtcgagcagtgtgcgggtcgcgtagctcgtcagcaggatgcccagaatctgcaggaccgccaatggctgctggtgcaggttctgcaggttgaacaaccggactcagagcagtttctcggaggcggcgtaatcggtaatcaggtacactgcgaacgcggattacgctatccggttgatggcacggctgtggaaggtggcgcggtcgaacagtaggaacatgccgaagcccaccatgatgacgggcagcttccatgacccagtgatgtagattcccatgctgtgcccaagcagagcaacgttgcagatgcggcggtgtataacaggaagaatccgagtctgataccaaccatcagccagatttgtttggtcgtgaaaggtttcatataccacttataggcggaatctccaatctaacgggtgctgcactttcaattagacaacgggcgtatgcgcactctttatcggcatgatagagagtagcgaattgtgattctcgcaatctaaagggaattgatgttgttttttcttcgattcattattgtgcagacagcccatatgaacagtggaattgcatagaatgcgtatgattcaaactgaatatataggtatgcgagaagaatgaaccagcatatgttccgtcggctccatccatgatggaccgctacgtgtgctaataccaagagcaagaaggccaaaaagcagaatagaccaaattcggtaatgaagctggcatagatgctcattgtgaaagtatccgctgggggatttgctaaaccatcgatttcggtattgggcgcaccgccatgggcgtcatactattggcgggcaccggcgtaaccagtacgcactgcattagagatattgcctgcgccccatccaaacatgaagtgagatagatcatgtttccatgaccacatgggagcgagcatatggaagattcttgcactcatcgatccgtcaccagcaagtaatccattggtggctaaagagtttagacgcggattgatgataattgcgctcaatccacctgctccaagaagtcctaaagcaccgacgaacccagctgttaccttacgtgagtggaagttgattgtcgctatcagccagataaatgtagctaccactgtatccagtatgattcgggtgccggagcccatcgcaattgctccagcggcaaatatcggtatcaatatgccaatcttgcggtcgcgggtcagccagaaaactggcaggagtacgccgaacagatgcatgccgatatagctaggttctgcgaacatgaattgaggacgaacgctcgcatagtttctatacagagcaccccaaaaatatgctcgtactggctgccagttcagatgtcgttctaaagcgataaattgcagtatcccaatgaggaatgccactacatatgcggtgaatagcgtagttaacaatgttcgtacaggtacacgtttaatgcggatcgcgatgtcgagcgaagccaagcacgccagccctaacaatatggagatgaatgactttgcggttgcgctggcgtgtattccatatgactgccagccgtatacggatgtgagcactagtagcaggggaaagaggaagaacggcaggaagcggcgtgcggtatcgcgcaagtatcgccagttgaggattgtgtacagggtgaacaaccagggggagattggcgtccaataggggagtggaatgccaatttttgtgccatcaaatggcagcatggccactgcggcaaacatcaacatgtctgatggggtgatggtgatacgagtcagcgtctcggtcattgccccacgctgtagcgcggggcaatgaccggagtttctgcgtttttcttgaactggcttgttgccgagctgcgtattgttcggtgtggacatacttggttccctcccatatcctccgtgagaactgtaccagttgcatgtgtgggtgaggcgatgggggttcggtcaaccgttcactttcatgaagtacttttaaactcccaccaagtaattggcagtcgcttacaaaaactgaataatctatgggccaatcagccgtttagatcctctccgtggggctggtgcatgtattgttcaacccaagccatgctggtttttgggaaattaaaagcctgaattatcattaattcgaaatccaggcttttacagtattcgtataatcgcgaattaagcagaaatcactcagccttcttgcggccgcggcgcttcatggtgccggcagtggcgtttgcgacatcaaaaatcacggtcttgtcttccgggtaagtagtgccgttgacggaggcgaaagagacctcgccttctggagcttcgacaagcgtgaagtacttggaaattgcttcaacaagcacagcatccttgatacttacagacgtagtctgcttgccctcactcttgctgaatttcacggcattatccgccttagcggtagtcggcgtgacggcaatttgtctggttttatcgttaataaggatcttaacttgtgctggaaaattcagcacttctgcggtggccttattaaaacgtacaacggaatcggtaacggtcattaccgttttgccaacgggcttaactagctgaacttctttgaatccttgaagcaaggatgccataatatactccttcacactgcataaatagtattgacaattttgattgtaatgaatgataatttgaattacaatacattgtgattgcgattgtgtacagttattctgcagtcgtatcaagggttttggtcattgttcacaaggatacaaaagctcgagaagttccccggtagatgctaaattatagaccatctgtgaaaatttcccgaagaggtaaggaagaacattgaccatcgctgatttgctgcagattgttcgcaagcatctcgcgtctgcgatcatctcgtttgtggtggtgtttgctgcggttgcagctgtcacgttcatcatgccgccgaagtacacggctacggctgaagtgttcgccacgtatgccggtcagtccggcgagacgcagactaccaacgatatgagctctggtgccaattatttgaacacccagatcaagacgtatccggaactggtgaagaccgaagccgtgctccagcccgtcattaaggatctcggcctggatatgaccacgaccgatcttgccggcgtggtgaccgctacgaaccccacgaacacgttcatggtggacatctcggcggaagtcgacgatccgcagcaagcggccgacatcgccaacagcgtggcgaagaatctctccgatcagatttcctctgacctgtacaacaactcctcctccagcggctctcccatcaagctcacggtagtgcagaaggctcagactcctaccgggcagagttccccgaacattccgctgtatctggctatgggcctgattctcggcatcatcgtaggcattggcgttgccctgctgaaggacatcctcaacaccaaggtggactccaccgatgatgtgcgtgagctgacccacgcttcttcgctgggtactgtgccacaggctacgattcttgacgacagccgtccggccgtagtcgctcagccggccggtagcgaggctgaggaattccgccgcatccgcacgaacctttcgttccttaccaccaccgccacgcagggtcatggccgactgctggtcatcacctccactgatccgtccgaaggtaagaccacggtttcctccaacgttgccgtggctctcgccgaggaaggcaaaagcgtgctgcttatcgacgccgatctgcgccacccgtccgtggctcacaagctcggcattgaaggccacgtgggcctgtctcacgtgctgtctcgccaggcgtccccggccgatgtcattcagaagtattggaagccgaacctgcacatcatgcctgccggcacgcgcccggctaacgccagcatcttgctgaactccgatctcatgaaggaaatggtcgagcaggccctcacccagtacgattacgtgattctcgatactgctccgctgtccgtagccaacgacgccaccgtgttcggacgtatggctggcggtctggtgctcgtgactggtaagggcgtagtggagaagaaggagctggagaacaccgctacggctctgcaggccgctgaagtgccgattctcggcttcatcttcaacttcgctgatccgaagaagatacactcgaagaactattactactactattacgaggacggcaacaagcgcagctctcataagggcgccaagagcaagggcgagaagaaagcccgcaagtaatagtttggcgtttgccgatcgtcttgcaatataaaccgtgcggtacttctgtgccgcacggtttactgttataagactgagttgttggatttatggtgctggctgtatatcgaatagtaaagaattgtgacattcttgaataccagctggcacgctcggcataaggctggataaactgacagtttggaatgacttcaatgatgcaaaggaatgagaagagcatgggaacagacgaacgccctgaaccgaacgcggaatctggttcctctacgccgccggctcgcggtgacatcgtcgataccttctgggatataccgcccatctcgttcgacgagaacgacggcggtattgcgcagggtgacaatggtacggggactgttgcgggtggcgttcagtccgtcttccccagctttgacgaagtattggaatggcctactgcgagtgcggcgaatactgctggcggtgcctcttccccttccgatgcggcggctactcctccgatgacttttgcggcacctgatactgcggaaagtgctcagtcgtctcagcaggataataatgcgacgctgccgcttttcgcgccggttcctgaagccaagccacaacgtgatagtgccacagacgatctgaacatcgatttcagtgccattgaacagaaccctgagccggtggaggagccggagggagaccgcgcggcagaggtgtctcgcggcggcaagggcggcaagaagaagaccaaagttattatcatctcgatgattgctgcgctggtggtgattgcagcggtcattggtggtgtatgggactggcgttccagcgaacaacgtcaggagaaccgtcagctgcaccaagatgcgttgacggcatgtactgaggctatggaccagaattacaccgctcagaaggcgctgaccaaggcgttggctgatgccaagagtgctcaaagcattacagctgatcaagtggctgacggtgcgaccgtggatgcgctgaagaaggcaatcgccgcggtgaagaacgtggaagcggtggagtgcaagacttcagcttctacgtcggacctcaaggaatatgccaagacggccactagccagaccaagaccgccaagaagaacgccactgcgattactgccgcggcaaaggccgtgacggacagcaagaacgctaaggatcaggctaacgctcagcaggcgttgcagggcaagattgccgaggctcagactttgctggacaacagcctgtatgccgtcgacgataattcaacgcgcgtgacactggaaagcgacatcgccaacgccaatactgtgttgtctcagcagggcactgacgtaaaggccatgcaggatgccgtcaacacgctgactgcgtccatggatgcagtaaacacatccatggccaactacagcgcagctgttgaggctcagcgtgctcaaagccaatatcggtatcgttattcgaaccagagaacgaccactactacgaccgatcctactcctgatcccgatcctactcctgatcccgatcctactcctgatcccgatcctactcctgatcccgatcctactcctgatcccgctatgtagcctcctgctacatctcagtctggtggcagtcctggctcagatgccgattctgatcaggactgatcctaatgcggaatagtctggtactgacggaacctatgaaaataagggcctttcgctgtttgtggtgggtggtaggtctgtctggtggtaccggtcgggtaggttgagggggcatggatacctctcacctgttcaccgccgccctgcagttgcagtctccttggaaggtcgagtccgtggatttcagggatgcgggggagggcaggcaagagctgcgcattgcaatcggtttcgaggtgggctcgcgcttctgctgtcccgtgcacggggtgaggacggttccccgtcccgtgggcgaggccgggcggcgggttcacgctcctgttcgaggcgtgggcggcggagatggcgagcttgtcaaaaaaaacaggagacgccgccccgacatcccacgcaccatcgaaccgggctgctccaacgccaggctcgaggcgttcgacaacaggatcaaggtcaccatccgcatggcctacggcttccaccgcgtcaccaacctcatcgccctgatcatgctccgatgcagcggactcgacatccgactaccacaacccacaatctaacccacaaaaacagcagaagcctctcaagtatccaacttttcgtccgcacccccacaaggttctaatcaggcattacagaaagcgcgtcaccggttccgagaggagtcggcggcgcgcttccataagggcacgcaatcccaagatcacacccacagatcaataccgatcagtactcgtacgtgatcgcggggtcgccgatggtcggcgtctgatccagtttgaggttggccgagccggccgcggtggtcacgtcgtattcgatggtcaccgtgtcctgaggtgccagggagatgtcgcccatgtaggtcatatggtccttggcctgcacctgcgcgaaggaactgccgttcgacgccgacacgttgctgacctcgcctccggccggcgtgtagatgaccacgcggttcaccgccacgcctcccttggcgttcgccgtgatgtattccggcagggatccggcctcgcccggctgcagggtgttggtgaacgaatacgtaacgtggtaggtgttgtcgccggtcctcttcaccgtcgacttgcgctggatgtaccagtccatcttcgaggcctgcatctcgttgaggtagacgccggtcaccgggttcttcgcgtcgttggtgatctcgccggtgacgccggcgctgcgcagcaccgcctgatcctcctcgtggaacgaccagaagtacaggtgccgctgctcggccatccggagcatcgtcttggcgacggtcatgagcttctgcgtgttcatgtcgctgaacaggtgggcgaccgcctgggcggcggtctcgctgaagtactggtcctgagcggagggcgtcagttccttgtaggcgccgttgagcaggaattcggcggtgttcgacccgttgagcacgcgcccgtcggacagagtcacgtcgccggtggcgccgatcatcgcctgcagcgcgacggggtcgagcgacatcacgccgtcggacgatccgccgaacggagccgcctgccagaacttctgggccatggacgcgacgcgcgggaagtccggcgtggacgaaagattatgaatgacttgaccgaagtacagtccgctgtacagcgtgccgtcaccgtcctggttgacgtcatccaacgcggcgttggaggggaactcggcatccgcgtggaactcccccaccgcgatcttgccgttgtccgcgctgaaggaaccggccgaaccgatcaggccgccggttccgcggatctcggaattcgtctgggcaagcagcacgtagttgcgggcgccgttcgcgccgaggaagttcggcagcatgttgagcatgccgctcaggttttcggtcacctgcgccagggcggccatctgcgtcttgccgttctgcagcgcgttgttcaccacgccgagtttggcgtcgggaagatcctggatcgtcctggcctgcgattgcacggactggtcgaccgtggcaagctgctgcgccgcggcgatgatcggctccatgttgagctgcccatcgccactggagaggctggcaccgatcagtgtggtgacgaccttgcccagctggggcagcgtggtctgcgcgaagtcatcgatggtaccgatggcggtgcgcgccgtcttcacgtcaccgccgaccacgggcatcttctccgccagcgtccacagaccgccgctgacatcctgcttggcggcggccgcctccttctggatgtagctcacgtcggacagcgccttgaccatgtcgtcggtggaaccgtccttgatgaccttggccgcgttgacgacattgttgaggtgcgctttggcgctcatcgccgacttgtacagtttgaatccgctgaagccggccgccgcggcgcacacgaccagcaacagcagtacgacgagcagcgcgttgcgaacgcgatgggttgtcctggtgaccgtgcgtgcgtgtgatggcatgggctacttccttacgttatgacatgtatcgatactggctagctgcccggttacgctttcgctggacaggtagcccggcggacggcacgtagcagtgcacgacgtgcacatcgcgtatgatgccgggggtgtcagcacggctgactggggtggccgcggaccggatggagcaccggcaccgccggcgtcgtacaggtccgtggggaacgtgatcggaggaatgtcccagaacgtatcgacgatgtcgtgattggcaacgggaatcgccgtgcccgccggttcggacggggcaccggaacgccgctcatcgcctccgtgggctgcgcatcgcccggttgggcaggcccggacatcggagactgcaccatcgtgggctgatccgcgacactgttatgcgccgccggagccgttggcgtcgtattcttttccggctggccacccgttcccatgagctggcatgcacctttcagcgagtatttctcctaccgcatgccagtctacccatgcccgcgggataacccaaaaagccctgcaagaataccgatctttgagacttctgctgtttttgtgggttagattgtgggttgtggtagccggatgtcgagtccgctgcatcggagcatggtcagggcgatgaggttggtgacgcggtggaagccgtaggccatgcggatggtgaccttgatcctgttgctgaacgcctcgagcctggcgttggagcagcccggttcgatggtgcgtgggatgtcggggcggcgtctcctgatttttttttggaaagctcgacgatctcggggatgcggctatgcgaggcttggaacacccagcggttcagctctcctttggcccggtcggggggagcccgagcagggtgtgcagcggttccttgagccgccatgaacggtagggctggcccttggggtccgttcgttgcaggctttcgaggtgcgctgccggctccagcgcgaacggccccaccgaggccatcaacggcaggctcgagaccctcaggggcatcgccctcggcttccgcaacctcgacaactacatcaccagaagcctgctccacaccggaggcttcagacaagccatccaaacccacctctaaccacacgccatacacaccaaaatgcgaagagccggcaacaagccgcagaccccggccaaccagtgcaagggcgagctctcgcaaaccggtgccgcagtggagccggttgcggtcgcgctgctgttcatggcatttgccggaatcacccttctgctggtccgtcgcaagaccaaccgctgattgctgattactgacaacacataaccaaagagcctctgccggaatcaaaccggcagaggctttttgcatagagaataatcgcaatcagtaattgttatgagcgatccagtagttgtacgctgcgacgatgccgccgtagcgctgctcgcaatagctgatgaaccacttgaactgggtcttgtagttggtctgccagtccgcaccggcggaagccatcttgctaccggggtaggcctgacccaagccataagcaccagacgtggggttggtggcggtggggctccaaccggactcgtggttgatgatgtagttcgcagcggtgaagtccgcttcgctatacccgttgtccaacagatactgatgcgcccaggactgcacttctccagccggaacagtggtgccgagatcggccgacgacgatgacttggtggaaccagtgcccaccaggatcaccttatccaccggggccttcttgacccatgaggcgaatacgttggaagagatgaccttgtcgccggctcgcttgatcagcgaggtggtctccataatgcccttctggccctcggtctcgaccttttcctgacccttgggcaggctgctggtctccttgcgtacttcattgaaggcgatctcggtatcgttggtctccacatcggcatccgcgcgattaatggtgaccacggtggcctcggtgaccttggatttcagcgagggagatacggcatcatccggggcaagcgtgatatcacccgtctccagcacgtccttgacggtggtcatgttggctttttcgccaagtactacgcgcgaatcgccattaatcttcaccgtaacgaacgtggtgttcttgtcggcgctgttgattgcgccacgagtggcagaacgggatgcggccgaatcggtggcggagaacgaagtgatggtggaaatcggcttcacatcatcagcatggtagaaactgcgcgacaccaatcccgccgcgccgagcagacctgccgcggccaccacagccgcgatcttcatccactggcgcttgttcaacggtctgagcatacgggtcggcttggcatgtctcgtcattgcgctccttgatcggatttcacactgaccaccatgataggcggcgcagtggatgaaggaaaatcaggctcaggcctgctggtcggcaccggactgggcggccttggcggcggccagatcgagtgccttggcctgggcgatcagatcgtcgagatcggcggcctgcagcgcgccggcctgctggaagatgacctcgccctgcttggcgatcatcagcgtgggcaccgcctggatgccggcggcctgggccagatcctggttggcgtcgatatcaaccttgacgaaggcgatgtttgcgttctccggctcgttggaggccgcctcgaaaatcgggccgaacgcgcggcacgggccgcaccaggtggcccagaagtcaacgaacacgatttcgttgtcggtgatggtcttctcgaaatcggcggaggtgatggcggtggttgccatgatgttcccttcttttgtgttttccttggcatcgccgtacggccctcatgcgtggccgccgggcgattgccttattcatgcaatacgtcttggcgcttggggccgtgcggttcgtggccgtcggctccctgctggctaccagcttcccagcaccacccaacatttgtgtcgtattttccgccgccggccaaacgtttcccaagatttcgccgtaaggtgacgtgtggcgtgattttgcgcgcaataatgggatgcatgccagtcatgaatgatgaagtgcccgacgagggcgattatgatgccggccgtggccgcggcgaattcgacaacatcacgcccgaggacttcatccacggaggcggttccggtcatggcaacccgccgggctggctggggccgtccgacatcaaccgggcgcgccatcagatgcccatcgcgtatgtggaaatcgtgcccgtacgcaccgatgagatgggccgtatctcccaagtgggctcgctgctgcgcgtatccgaggacgggtcgatcgagcgtacgctgattaccggccgtgtgctgtaccacgagacgttgcgcgaggccatcgcccgcaatgtggccaaggacctgggcgatatcgccttgccgctgctgccgatcgggctccagccgttcgccgtggccgaattcttccccacgccgggactaagcgaatactacgatccgcgccagcacgccatcgcactgtgctacgtggtgcctatcgccggcgactgcaagccgcaggacgagacgctggatgtggaatgggtggatcccaagagcgacgtaatggacacgttcgtggcgcagatggtcaacggccatgggcgcatcgtgcgacaggcgttggcctgggccggaatctgacagttgttttgccttccgttggaggggacggcgcgtagcgacggagggcggtccgcgttgagaccgctcccagccgactgtgccgacagctccgccagtggggcgcgaatgtgaaggagtaattcatggcaatcgaattggccaatcatatctaccgcgacggcgaaggcgtgccggtggtgctgatgaacgcctacccggtggaccaccgcatgtgggacgtgtgcgcgaaggcgctcgccgacttcgccgatctgaacgacgtgccggacttcccgatctgggctccggacatggccggctccggcgcatccccggtgccgagcgacgccgattcgggcccccgcatggcgaacggcgcgtacagcgaggcgttggatcgcctggccggagcctacgtggacctgatcaaggccgccggctatgagcaggcgatttgggtcgggctgtcgatgggcggctacgtggcgatggacatccagcgcctgtaccccgaaacagtggccggactggccttgtgcgacacgatggccgcgtccgacggcgtgggcggagagaaccgactgaagatggcggacgccgccgaacagacgaactcggtcgaaccggtgatgcacttcgcgcagccggccgatggcgattccaccgtcaagaagactcctgaattcatcgcgaccatgaccggctggatcaacgaacagaacccggctggtctggcctggcgtcagcgcatgacctacggacgtcctgaactgggggcggtgccggaaacgatcagcgcaccgagcctggtggtatccggcgaactggacccctccagcaatccgagtgtgatgcggccgctcgccgaacgaatcaccggcgctgaattcatcgatattccggactgcggccatttcagtgccgtcgaacatccggataccgtggcgcgagcactgctctcgctcgtcaagcgcgtgcagagcgcgcagaagaacgcataggagacctcgatgaccgctgacattcatttctcgcctctggcgctgacccatgcgctgccgttcctgccgctcgcacaaggtgacatcgactatcaggtggaccggcgaagcgaacccggcctgatcgacgagctgctggccgagccgaccaccaaagtcgtgcttacgcgcggcggactcgtcgccgtaccgcgcggccaaggcgagcttgtggactatgagaacgtgaaaatgcggctcgccacgttgccgggcgcctatgtgtccgccgaactggcacgctaccccgaagcggtcgccatgttccttggctcctatgtcggggcgcgcggcgaatccgtggtcgccgtggatatcacgcgcgtgccggaagccggcgttcccggtgttggcgggattgccggtgttggcggtgccgtcggcggcgtgctcggcacccaggattccggcactgtggacggcgcgctgggcaagaacggcatcagcggaggtgctgccgccggaatacggcagccgggaaacgccaagggtaatggcggcgtagccgcagccaaaatcgccgggccgctcggtgtaccggattcggccgggcaaggtgcggacgatgccttcgatgattcggtcggcgcgcccgtacagcccttggccccgaagcccacgctgctgcaacaggccgtgacccggttcgactgggtggacctgcgcggatttgcccctcactccaacgcgcgcgaggccgggcaagccaccagtgccatcaccttaagcatctggcacagccgccagcggttctgtcccacctgtggcgcggcggtccggccggcgctcgccggatgggcgcagcgatgcaccaacgaggcggacggcaaccgtgtgctgttcccacgcgtggagccggcggtcattaccgccatcgtggacgggcacgaccgtctgctgctgcaacacaacgcggcatggaaggattcgaggctgtattcggtgtccgccggatttgtggaggcgggggagaaccttgaacacgcctgccgccgcgaggccatggaagagaccggcatcaagcttggcgaggtgcggtacctgggttcgcagccgtggccgttcccggcttcgctgatgatggcgttcaaggcacatgcgatcaccaccgacgtgcgtgtggacggcgaggagaccatgaccgcgcgatgggtcacacgcgacgaatacacggccgagctcatcgccggccgtatggcggcgccgggccgcgccaccatcgcccgctacatgattgaggaatggctcggtcgcgagctgtgacggaccgcgaagataggttaggcttatgactatgagtgatgacaacgaaaacgaacagccgctgaatctcgacattcccgaccacctcgaatactccgaggaacatgcatgggtggaccgttcggtcgaccccgcaatcatcggcattaccgaatacgccgccgaccagcttggcgaacttgtgtttgtggatctgcctgagcctggcgcccgtgtggaggccggcgacgagatcgtggagcttgaatcctccaaggccgtccagccgctgatcagccccgtggcgggtacggtcaagtatgtgaaccgtgacgtggcggacgacccgtccgtggtcaacggcgatccgtacggcgaaggctggctgctgaaggtcgagcttgacgacgatgagccggagctgctgagcgccgacgaatacgcgaaggtcgtgcggtagttccttttgagctcccctctctgaggggagccaagaaaatgaggcgtatggcctatattggtgtctatgagaagcccacgcgaggattttgaggcggcaggcaagcgactgccttgggatgctgctgcttgcaatgcagcgctgtccgccaccgcgccagtctctgacgtcaaggcatccgccaatggtgccgacaatgccagcaacgctgaacattccgatgacatgcccaccgtgccgattcccgcacgcaaggctgccacgacgttcgacaccccctccaagcgtgagcgaatcgaagtcaagccgccgatcacccgattcatacgtcgtgccgtcacccgcgtgttcggcgtatggtcacgcatctccactcaggtggtgcgccaatgggactggtatccgcgagtggaaccctatgtgggttatggcaccggcgattactcgcgtctgatctgccgcacggtatacgcccccaggcacgcgcaatccggcgaactgatccgcggcatccgcggcatgcttgccatacccgcgccgcgcacccacgtgcaggccagcattgatgacatgccgctcaacaccgtgcagatcggcgtctccgaggtctatgacaaggtggaccgcacgcgcgatctcggcagcgaatacgccatctccgattccgccggatatctcgacctcgtggccgagcatcgtctggtgcccggcatccatcgcgtctcctacagcgtggccaaccgcaaacccgtgagcgccaacctgtacaccatccccgccagtgccaaagtcggcatcatctccgatgtggacgacaccatcatgatcacgcaggccccggtgccatggaaggccgcgtacaacctgctgttcctcgaccccaagaagaaagcctccgtgccgggcatgagcgtgctgttcacccgcatcgccgacttgttccccggcgcaccgttcttctatctttcgacatcgccctggaatgtggagagttcgattcgcaacttcatcactgaccatggttttcccgaaggcccgctgctgctgcgcgacctcgacccgaggcccaagaccttcgtacccaccggcccccagcacaaacttgagtttgccgaacaacttatggccgacttcccagacatgaagttcattctggtgggcgatgacgggcagaaagacccgaccacgtacgccaccatcgcccgcagatatcccggacgtgtactggcgatcgtcattcgtgagttgagcccgcgcgaatcaaccggattggcgtcggtgacggggctcacctcgacccagccgactccggtaaccgatgtgccagtattcaccggcaccaccggctcgaacattctgaagaccatgctgccgtatctgaagacggtgttgcgataggcgcggcgtgatgaacactgaatgcgtcccggtgcggtgcctcgcctataatcgcgtggtatgactgacgagagcacaaacgccgcggccgcgatgccgccttacgccaagcgcgagccgaagcgccgcgaattccacggtgacgttttcgaagacgattacgagtggatgcgagacaaagactccgatgatgtgcgcagctacgtagctgccgaaaaccagtactgcgagcgtcgcatggcgcatctggcggatttccggcatacgttgtttgaagagctgaaatcgcatgtggaagagactgatatgtcggttcccacgcgcgtcaatgattactggtacttcacccgcacgcagcagggcaaacagtatggcgtgcaatgccgcatccccgtgcgcgatgccgatgactgggacccgccggtcgtggatccgcaaggcgcgcccggctccatgcccggtgaacaggtcgtttttgatgcgaacaaggaatccgaggggcatgacttcttccggctcggcggcttggatctgagcaaggacggccgttggatgctgtacggcgtggatgttgcgggagacgagcgatatgatttccgcattcgcgatcttgccgggctggagaccggggagccggtcagcgaactgcccgaacagttcaccggcattggcagcgcatgcttcacgccggacggccaatgggtgttctgggtggaattggacgattcctggcggccgctcgctgtgtggcggcatcgtgttggcacggcggtcgaatcggatgtgtgcgtgtaccgagaaaccgatgaacggttctgggtgggcgttggcatcagttttgatgagcgcaatatcgtgatcggcaccggttccaaaaccaccaccgaagtgctgatgctgccggtggccacgcctgaaggcgaattccaagctttcattccgcgtcagaacgatattgaatatgatgtgagctttgcctgttttgaaggcgcgggggagaacggtgcggatgtgccactcgccgtggtctatcacaacgctgccaatccgaatttcgaaatcgacgtcattgacatgcgtggccatgagccgccgtaccgactcggcgaaggcgtgtgcattgccgccgggtcgccgtacggctgtgaacatggtgagccggataagccgattaccgaggcatacttcaacgccgtcaatccggcgatattgcagggtgcccacggtctgggcatcgaaggcatcgcgttgcatcgcaactttgtgtccctgagctaccgtgccgacggccagccgcacgtggcatacatgaccaagagcgcggctgccgccgacttcctggccggacggccgtggcggtttacggaattgctgccgcctgccctggaggacgactgggacatggttgccgacgatcgcgaaaacttcaccggcgatcatggcgaaatcttgtggaccgaagatgaggcccccacggatcacacgtcatcttccgatggtgctagcgacgaccacctgcccggtgagacccggcgcttgtacaccatcggcgtcggcggcaacccctcgtatgaggcgccgcgcatgcgctactcgttcgccagctacacccgcccgggcgagttgcacgaaatcgatcccgccaccggtgaagatgcgctgctgaagcgagccatcgtgttgggcaacttcaatccacgcgattacatggaacgccgtgtgtggattaccgcgcgcgacggcgaacgcattcctgtttccctcgtctggcaccgcgattgcccggcgcaggattcgccgatgttcattaccggatatggtgcatacgagatttcctccgatccggggttctcggtctctcgtctgagcatgttggatcgcggtgtgctgtacgccgtgccgcatattcgtggcggcggcgaaatgggacgcgcctggtatgagcaggggcgcagactgaacaagaagcattcctttgaggacttcgtggacgccacacgcgcgctgcagaaggcgcatttggctgatgcttggcgcaccgtggccaacggcggatccgctggcggcctgctgatgggcgcgattgccaatatggcgcccgaatgctacgccggtgttgaggcggatgtgccgttcgtggacgcgttgacctccattcttgacccggacttgccgttgaccgtcaccgaatgggacgaatggggagacccgttgcatgaccctgaggtgtatcagtacatgaagtcgtacacgccatacgagaatgtgccggtcgccgtgctcgagggcggcaacgacgaggctgccggtgacggcagtgctgatggggctgccaccggcgcggtcgccgccgcgcaattcccgagaatcttcattaccacctcgatgaacgacacccgcgtgctgtacgtcgagccgctcaaatggctggcccgtctgcagtccgccggcgtggacgcggtggccaagattgaggtcgaggccggtcacggcggtctatccgggcgttacaagcaatgggaagaggtttcctatgagaacgcttggtgcatggatgtgatggggctcgctcattaggccatgtccactagctgagcgggttcgggccggcaggtgatagcgcgagtaggctccttgaactatggcaaagacatataaaatcgccgttattcccggcgacggtattggcaaggaagtcactccgtgggctcagaaggctttggaaaaggccgctgaaggcgtagctgacttcgagtacgagaacttcgacttgggtgccgagcgttatctgcgcgatggtgcgattctgcccgaggacgaagaggagcgcatcaaggccaacgacgcgattctgctcggtgccgtgggcgatccgcgcatcaaggccggcattctggaacgcggcctgctgctcaagctgcgcttcgacctcgaccagtacgtgaacctgcgcccctccaagctgtacaagggcgtcacctcgccgctcgccaaccccggcgacatcgacttcgtggtggtgcgtgaaggcaccgaaggtctgtactgcggtgccggcggcgcggtgcgccgcaacaccccgcaggaggtggccaccgaggtgtccatcaacaccgcatacggtgtggagcgtgtggtgcgttacgccttcaagctcgctatgaagcgcaagaagcacgtcaccctggtgcacaagaagaacgtgctcgtcaacgccggtgatatgtggcagcgcatcgtcgacaaggtcggcgaggaataccctgaggtcacccacgactaccagcacatcgatgcggccaccatcttcctggtctccgacccgagccgtttcgatgtgattctcaccgacaacctctttggcgacattctgaccgatgaggccggctccgtggtgggcggcgtgggctactccgcctccggctgcatcaacgcctccgacgagttcccgtccatgttcgagccgattcacggttccgctccggacatcgccggtcagaacaaggccaacccgaccgccgccatcctctccgccgccatgctgctcgagcatctcggctttgatgatgcggccaagaagatccataccgccgtcgaagcggacatcgaggagctcggctccaccgtgcgctccaccgaccaggtcggcaaggacattctggcccgcatgtgacctcaaacctggctcccctcgctgaggggagccagaaaactctctatactgagttgcatgcaaatgcgacatggggaatgcaaaaccgttggcagcaaactagtcgccgtgaccgtatccgtcgatgatgacggcaccgcacagtcatgccatatcagtggtgatttctttattgaatcagtttcggatgccgaatctcatgctttgttgcatgacctggaacgagctctaattagcgatgattcattgcggtccgtattggacgctcaccctagttgccaaattatcggcacagatgaagttgccatcaaaaccgcatacagccgagccgtaagcagcaacttgcccccgctggcgggggctccagctcagcgggtgggggtgggcagccccgatgcgccgaacatcccagcatccatcaatacacaaaccaagcagcccgacaaaagctctgaataccgggagcgctggaacgccctcaagcctcaactcaccgtgatccacgaccatccgcgtactccggacgagcaaatggccattgacgagacctgggcgcgtgaagtcgcagcaggaacacgacagccgaccatccgattatgggagtgggcgggcccggctgtggtcatcggccgtttccaatcggcccaggacgaggtgaatctggacattgccaagcagctcggcttcgacgtggtacgccgttgcacgggtggcggagcgatgtttatcgaaccgggcaacaccattacctattctctgtatgcgccgctcgatttcgttcagggcgtaagcatcgaagaatcctaccggctctgtgactggtggctggtcgaagcgctgcgcgaacttggcttggatgtgcggttcgcgggcctcaatgatatcgcctcgcagtacggcaagatcgggggagcggcgcagcggcgcttccccgtaggctcaggcggcgcggtgctgcaccatgtgaccatggcgtatgacatcgatgcggccaagatgagccgtgtgctcaacaccagtcgcgagaagatgtcagacaaagcggtgaaatcagcggtcaaacgcgtggacccgatgaaaagccagacgggtctcagccgcgaacacatcgtcgagcaccttattgactggtttgcggcgtgatttcaccgatggccgtatacgattttgccggtggccgtgcgcggttttgtcatgggcgagcgcggtaaccgcgacagtgccgtttttcgcggtaacgcattcgtcagcatgccgtacggctatcggatcgtgccacacatgaagtgacgaatgagggcatgctcctgacgaaacctgtgggggcgcgttacaatatgacggatgggcgacgacggtcataggacaataaggatggtgcgatgagcttggaaacgccaaacgcttttgctgacgaggaaaacatcctgttgcatacggcattgttcaagcaggtatcgccagccgaagccgaggagctgttgccgcatttgaagcatgcgacgttcgataaaggcgactatatcttctccgaaggcgataccgatcagcgcatgtatttactggagcaggggcgcgtcaagctgattcgcacttcttccgatgaccgcgtgcagctgctgtccatccacgcgccgggcgaagtgcttggcgagattccggtattcgaccctcatggtggcccgcgcaccgcgtccgcggtgtccatgagccatggcacgcgcgtggtctggctggagcatgatgccctgttcgcatggcttgatgagcatccgcgtgtggccatcgacatgttgcaggtcatggccaaccgccagcgcggcaacaacgaacgcatctccgacttggtattcatggatgtgccggcgcgtctggccaagacattgctcaacttgggctcacgtttcggcgagccggtggaacagggcctcaaagtgccgcatgacctgactcaggaagagctggcccaactggtgggctccagtcgtgagaccgtgaacaaggcgttgatggacttttccaaccgcggatggatcgcacgtgacggccgatcgatcatcatcttccagccaggtatgctgattcgacgctcgcggcgctgaccgttcggctgacttccagccaatgttacgctagtgcgattcttgtgatgatatgttcacgggagctgaccgtaagcccggttggtagggcaccccatttagaatggggcccatgcccaaaaagaagtccctcactctccaacgtgtgcttgttctcctcttggcctatatcatgcttgccgtctgcggtggcgtggcggccagcgtgttgtttgtaccgggtgtggtcggtgccaataaagccgccaaagcggtgattccgtcgctcaaggtagaaaacgtggacttcgacgtgactagtctgccccagaagtcgacgatgtacgcgcgagacggttccaccgttatcgcgacgttctacaaccaaaaccgtatcgtcgtgccgctgaagaagatttccaaaaccatgcagcaggcagtggtggcgcgcgaagaccgtcgattctggactcacgccggcgtcgatgtgcaaggcgtgatgcgtgcgttcgtgcagacctacctcgtcaaaggctcccagcagggtggttcgtcgctgacccagcagtacgtcaagaacgtgctgctgatgcaggcgatcgaggatgacgattcgatcgcccagtaccatgccactgaagacaccatcgcccgtaagattcgcgagatgctgatttccgtgcagatggaaaagaagtattccaaggccgagattctgcagggctatttgaacatcgcccagttcggcaacaacctgtatggcgtggaaaccgcggcccagcgctacttcagcgtgtccgccgccgatttgaacgtggtgcagtccgccaccatcgcggctatcaccaagaacccaagcctgtacgatccgctggtcgaagagaaccagaaggaaagcgaaaaccaacgcaatatcgtgctcaagctgatgctgcaggaaggatacatcacccaggaccagtacaccgaagctgtgaacacgccgttgaaggacacgctgaaagtacaggacgtgaatgtcggctgtcaggacactggcgattacgcgtacttctgcgattttgtggtgcatcgcatccagaactccgaagaattcggcaagactcgtgccgagcgtaacaagctgctgcaggagggtggcctgaaaatcgtcaccacgctggatgtggaagcgaattccacgatgatggagaccgcgcgtaataccattccaccggacgatcccagcggcatggagatagccatggccgcagtcaaaccgggaaccggcgaagtgctgagctttggcctgaatcgttactatgacgccactccggcagccgcgaacgatcccaccaggacgagccagaactatgccgtcgatttggcggatggcggtggttctggttggaccatcggttcgtcctggaagccgatcaacctgattgcgtggatggaagcgggccattccatcaacgacaacctccagacctcgacgtcataccccactacggacttcgcctgcagtaactattcgggcggtgccgattcgtggaacgtgtcgaacgccatgggcgcaggtacagtgaacccggaaagcccattcctcggtctggtccgttcgcataacactactcaggcttccatgggtgccatcctcaaactgtgcaaggtggcggacaccgcgactgaactgggataccatgacgccgccacgggtgagaccatcgacaaaacccaggtgtatacaccatccatgatgatcggctcggtgaatgtgtccccgctgaccatggcgagcatcttcgccgtatacgcctcgaatggtgtgcaatgcaacccgattgccatcagcaaggtgaccgataaggacggcaacgatctcaaggttccatccgcgaactgccatcaggcggtggataaggacatcatccaaacactcgcttataccctgaaccaaggtacggtgcggccggatggtgccggttggtcattcagattggctgacgggcgtaagtcgtttggtaagaccggtaccagtgaggatcttgcggtgtccggtggatcgttcattcctaatcagattgcggcgttcgctgtggtcggcgatgcacagaacccgtacaccaaccgtatttccaacattgccatcaacggccggtacaacagctattgggatggttcgacaatcgcggctccggccgttaccaacttcttcaatagctacatttccaagaagaaaataccgattgacaacgattacggccagcccgtctcgaagtacaccacgactggcaagtatctgggcattggcggacgaacgttcagcgtgccgcagaccactacgaatggcaacagccaatcgcagagcagcaacaatcagtctcagtcgcagaacactgggcaaaacaacacccaaacccagggcaccaattcagagcagtcgaatgatggccagtgattggtgattggcgtttgacatttggtgattgcatgccggctgagtctgcgtagcatggccgactgcgatacccaaattacgtagtttgcgggcgttacctgtttcaggtgacgcccgttttacaatacttaatgacaacgccatcgcgttcatcgaatatttgccatgaacgtgcatcggaaaggggaacgatgagcaacgacgatctgacgcatgagaattttgattttcgtggattcgacgtgccggatctcaaagcggtgacgctggcttcgtcttcggacggcgatcagtccaagcagccgaagaccaagcacgaggatgcatcgaagaaccgtaagcacggtaagaagaagtcaaaattcgacgcacggtccaagaagcgggccggcgcgggcaagacgagcgaatcgttcgatgattatgaggattatgaggaaagggaagctgtgagcaaggcagataagaaagtcagcaaggaccgtccggggctgtttgcgccaatgacgctgcgcgaggtgaccgtgcgtaatcgtatttggttgccgccgatgtgcacgtattcgtcgttcgcccgcgatggtaggcccacgccgttccactaccagcattacgtgtctcgcgcgttcggcggattcggcatggtgattgtcgaatccaccgccgtggctcctgaggggcgtatcacgccgtgtgatctgggcctgtgggaagacgggcagattgatgcttggcgctggatcgtggacggtattcgcgaggcgggtgcggtgcctgccatccagctcaaccatgcggggcgtaaggcttcgactggttgctttgccgttggttacgacggtcagaacgtgccggaggaggcgggcggctggcctaccatggcaccgtctgaaatcgcgttcggtgggttgcgtacgccgcgcgcgctgtccgtggatgagattcatggtctggtcggcgcgttcgccgtggcggcgggccgtgcggtggccgccggcttccaagcgattcagattcatgccgcgcatggctatctgatttctcagttccttgacccgctgagcaatgagcgtgatgacgaatatggtggcgatttgaccggtcgctctcggttcctggtcgaggttgtggatgccgtgcgtggggccgtccctgagggcgtgccggttctggtgcgcatttcggccacggattgggccgccggcggttgggatttggaccagaccatcgcactatccaaggtgctgaaggagcatggcgtcgatgtgatggacgtatccaccggcggcatcatgtcgggagtgtcgattccggtcaagccgaactatcaggtgccgttctccgagcaggtcaaggccaaggccgatattccggtgaccgcggtgggtcttatcaccaagccgaagcaggcggccaagattctggcccatggcgaagccgatgccgtggaaattggccgcgccgcattgcgcgatccgtactggccgttgcgtgcggccaacaagctgggcataccgtccacagaggtcccctacgccccgcaatacgtggccggtgcgtactgaatcctcatggggcggtgactttcccatggggcggtaaaaccctcatggggcggtaacccaaaacggcggtattctgcggaatgtgaaatttggctaaccgccccatgggacaatcaccgccccatgagggttttaccgccccatgggtaatagggcaatatgtgagttcactccacgtccacgccgacggcgtcggagacgtgctcgaatccgtcgcggcgcagcagctgggccagaccgcgcttcaacacggtgatctgctgcgggcctcggtacatcagcgagctgatgaacatgaccaggctggagccggaacgaatcttcgcataggcttgctcgggggtaaagacgccaccgatgccggcgatggcgaaccggtcgccatactccttatacaccttgcgaatcagctcggtgctggcgttggtgcacgggccgccggacaggccgccctcccaatcgcgcggaatcccgaggccggtgcggtccttctgcagattggcgatggacagcccctgcacattgtgatcggccagcacatcgagcagctccttgtactcgccccacggcttgttcaacggcatcttgaccagcgtgggctgcgggcggtcgatcttgtcgagcgccgtaaacagacggtcgagcgcttccggagtcgcggtgaacggttcgccgacgtgcgtgttcgggcaggagacgttgacctccaccatcgcggtgcggccggcggcgcggcgcatcgaaatgcagtaatcctcaatgccttcgtccaaatcgccgcactggtcgtcgttggtgcgggcgatcgacacagacagctgcatctggcgggcctgagtccaagccttctcggcgcgctcgatgaccttgtccgaaccgatgttggcgaggccgacgtgcaccatcatcgaatcgtattcaggcagacggtggaaccacggcttggcgttgcccgggcagggacgcgaggtggtggagcctacggtttcaaaaccgaagccggcatggtccagcaccacgggcatgtcgcagttcttgtcgaggccggcggacaggccgaacgggttggtgaaatcgacgcccatcacattcgtttccagaatggggtcggtgtagtcgagcatcagctgctcggcgagcagcagcggcgggacgttcttgacgacgtggcagaactcgatcatctgatcgtgtgcctcatcggggcggtggttgaacacgaagttcggtttgatgatgtgcttgtagccgaaggtgaacagatcggtggtggctttgttgacggcgtcgtgccagaagctttcagaaacgtaagtcataccgcctattgtctcacgcttgggctggtgcggctaggcgattcctgcctaggcgaattggggaagggggctaccgcgtgtcgaggcgcacgcaggcgtcggctcggcagaagatacatgaatcgggatgcaccaggtatcaggcgtgactcgccgctgagcaacgcgctcgggagagtcgtcggtcgtgagtcatcgcgctagtggtcgctgcgagaatatcggttcgcacaatgtgcgattttgcgcggttttgtggaaatgaacacctgaattgcctggaattttcgagagattgtccccaaaacgctcaagccggtttggtttgtgagcttttgtgtgcgataatgttcacatgatttcgtcacaacgtcagcacctcatcttgagcaggttgcgcacgcgcggggcagtgcgcattacggcgctatcgaaggaactgggtgtgtcggcgatgaccatccgccgcgatatcgccgaacttgccgacaagggactgctgaagcgcgtccatggcggcgcggtgactaccagtaccttgctcagcgaacccctgttctctgtcaagtcccagatggatatcggcctgaaggacgccatcgcccaggaagccatcaaatatgtggctcccggcgatgtgatcgccatcggcggcggcaccacggcctatgtcttcgcccagcatctgctcgaatcgcagcagtccagcggcatcaccatcctcaccaattcgattcccgtggccgaactggtccaggccctcgaatccaaggacgtggaggtgatcgtcaccggcggcgtgatcacccgatcgaactcgcttgtcggtccgatcgcggacaaggtcgtcgcctcgctgcgtgtcaacaccgtattcctcggcacccactcggtgtcgattccccgtggcttcctgatgccgaattcgctggaagccgcaaccgatatggcgatgatggacatcgccgatcgtgccatagttttgaccgatcacaccaagtggagctgcacatcgctgtcgctgtttgcgcgcttcgaccaggtggacacggtcattactgacgacgggctcgatcccgactccgccgccaaaaccaaggatttggtaaaggaactcgtgctggcccaccagagcgagatcattgaggaaagtgagtaaacccatggctgatttcgccaactacacccccggggagtatgcgaaggagcacatccgcatcacgccgacgacgcttgccgacggccgtgacttcttctatctggacgacgaccccgagttcgtctccggtgccaagacccgcgagctcaaggacccgcgcccgctggactaccgtttcgccccgcacctggacgccgacggcaacgaagtgccgtacgccgccccgcagatgcgccgcgacccgctgaccggcgactggatcccgatggccaccgcccgtatgaaccgcccgatcaccgccggccccggcgccaccgccaagggcaacccgctggccgctcgcaagcccggtgacccgtaccaggacggcgaagtgccggacaccgactacaacgtcgtcgtgttcgagaaccgcttcccctccatggtgcgcgtgcccggcgtctccgaggacgtgacctacgttgacggcaacccgctgtgggagaagaagctcgccgccggccgctgcgaggtcatctgcttcgacccgaacgaggacggcctgccggccgatctgccggtctcccgcctgcgcaccgtggttgaggcttgggccttccgtaccgccgaaatctccaagatggaaggcatcgagcagatcttcccgttcgagaaccacggccaggaaatcggcgtctccctcgcccacccgcacggccaggtctactgctacccgttcatcgccccgaagatggagaaggaactccagcacaccgaggcctaccacgagaagaccggtggcaacctcttgaaggacatcatgaacgccgagctcgaagccggcgaacgcatcgtgatgcgcaaccacagctgggtcgcctacgtgccggccgccgcccgttggcccctcgaggttcacgtggctccggtgcgtgacgtgctcaccctcgaccagctcaacgacgaagagcgttgggaccttgcctccatgtactcgcacctcctgaagcgcggcaacgccttcttcgacaagggcgacggcaagggcatggacctgccatacatcgccgcctggcaccaggccccggtgcacgacaagcgccgtgagaactaccgcctgaacctgcagttcttctccttccgccgcgccgccaacaagatcaagtacctcgccggctccgaatccggcatggccgcctggatctccgacaccacgccggaactcatcgccaagcgcttccacgagctcggctccatcgacatcgccgactgatagaaagaaaacatcaatgactgctgttgaattcattgagccgctgacccatgaggaaggcgtctcgcaagctaccaagctgttcgtcgatacctacggcgctgcgcccgagggcgtgtgggctgctccgggccgtgtgaacctgatcggtgagcacaccgattacaacgccggcctgtgcctgccgatcgctctgccgcaccgcactttcatcgccctgaagccgcgcgaagacaccaaggttcgcgtcgtctccgacgtggctcccgacaaggtcgccgaagctgatctcgatggcctcaaggcccgtggcgtggacggctggtccgcctacccgaccggtgtggcctgggcgctgcgtcaggctggtttcgacaaggtcaagggctttgatgccgccttcgtctcctgcgtgccgctgggctccggcctgagctcctccgccgccatgacctgctccactgctctggctctggacgacgtgtacggccttggttacggcgattccgacgccggccgtgtgaccctcatcaacgccgccatcaagtccgagaacgagatggccggtgcctccaccggcggtcttgaccagaacgcttccatgcgttgcaccgccggccacgcgctgctgcttgactgccgcccggagctgaccccgctggagaacgtctcccagcaggagttcgacctcgacaagtacaacctcgaattgcttgtggtcgatacccaggctccgcaccagctcaacgatggtcagtacgctcagcgtcgcgccacctgcgagcaggccgcgaagatcctcggcgtggccaacctgcgcgtcaccgccgacggcatcgccaaggccgacgacccgttccaggcgctcaaggagacgctggacgcgctgccggacgagacgatgaagaagcgcgtgcgccatgtggtcaccgagatcgagcgcgtgcgctccttcgtgcgcgccttcgccaacggcgacatcgaggccgcgggccgcctgttcaacgcctctcatgattcgctggccgcggactacgaggtcactgtgcccgagctcgacgtggccgtggacgtggcccgcaagaacggtgcctacggtgcgcgtatgaccggcggcggcttcggcggctccatcatcgctctggtcgacaagggtcgttcccaggaagtcgctcagaagatcgccgacgaattcgaaaagcaaggcttccacgcaccgcgcgcgcttgccgcgtacgcggcgaaatccgcttcacgcgaggcatgataataaatcacaatgctaaatggcgggtgtcttccctatacttgggtagtcacccgctttttgtatacgaccagggagagccatgaacaaggcaatcatcaccgtcgtcggtcaggacaccgtcggcatcatcgcgcgagtctgcacctacctgtcccagcacaacgtcaatgtgctcgacatttcccagaccatcatcgacggttacttcaacatgatgatgattgtcgactacgccaacgcggacaaggacttcggcgcgatggtcggcaaccttgaggacctcggcgacgacatcggtgtgcgcatccgctgccagcgtgaggaaatcttcaccaagatgcaccgtatttgaggcgaccggctcagcaggccgcctcacgcgaggaggtggaaagcccggtgggctttccgctgacggagccatccttatccctctgatgagggtgaccgccaaactagtcttcaaatatcctgtaaggaacaaaccatgctgaacatcatggaggtccacgagaccaatcagatgatcgagcaggagaagctcgacgtccgcaccatcaccatgggcatctcgttgctcgactgcgcctcggacgatgtcgacaagacctgcgacaacatctaccgcaagatcactacctatgccaaggacctcgtttccaccggcaaggccatcgaacgcgactacggcatcccgatcgtcaacaagcgcatcaccgtcaccccgatctcgctggtcggtgccagctcctgcaagacgagcgaggacttcgtcaagatcgcccacgcgcttgacaaggcggccaaggaagtcggcgtcgacctgatcggcggctactccgcactcgtttccaagtccatgaccccggccgaggagctgctcatccgctccctgccgcaggctctctccgagaccgacatcgtctgctcgtccgtgaacgtcggctccaccaagaccggcatcgacatgaacgcggtcgaactgctcggccatatcatcaaggacgttgccgagtgtaccgccgacaacgactcctacggctgcgtcaagttcgtggccttctgcaacgtgcctgacgacaacccgtttatggccggaggcttccacggcgtcaccgagggcgacgcggtcatcaacgtcggtgtctccggccccggcgtggtctcccgcgcactcgatgcggccaagggcaaggacttcgagttcctgtgcgagaccatcaagcgcaccgcgttcaagatcacgcgcgtcggccagcttgtggcccaggaagcatcccgccgcctcggcattccgttcggcatcatcgacctgtcgctcgccccgaccccggctgtgggcgactccgtgggcgaagtgctggagaagatcggcctcgagcaggtcggcgctcccggcaccacagcggcgctcgccatgctcaacgaccaggtcaagaagggtggcatcatggcgtcctcctacgtgggcggcttgtccggcgcgttcatcccggtctccgaagacaagaacatgatcgacgcggcttcttccggttgcctgaccctcgagaagctcgaagccatgacctgcgtatgctcggtgggcctcgacatgatcgccatccccggcgacacctccgccgccaccatttccggcatgattgccgacgaggccgccatcggtatggtcaaccagaagaccaccgccgtgcgcgtgatccccgtggcgggcaagggcgtcggcgaaatggcgaacttcggcggccttatgggctacgcgcccatcatgccggtcaaccagaccagctgcgaggccttcgtgacccgtggcggccgaatccctgcgccgattcacagcttcaagaattgattcggtagggtatctgctttcagagaggtacatttggcccctcgcggagagctatctgctttcaaagaggtacctatatgcggaaaccccgggtatgagcgttggaatatcaacactcatacccggggtttctcgattgcggtacctctttgaaggcagatagcattctgcaaacgctcgaatgtacctctttgaagacagataccagctcgaattacctttctggaggtctattcccgtttcgaggggctgattccgacctttctggaggtctacttccgtttcgaggggctggtatatatgaagaccccgagtacaagcattgatatttcaacggccatactcggggtctcgtcctttgacagccccttgaagcggcagtagacctccggcggatgccaaatccgcccctcgaaacgcaggtagccttatattcagcgttcatcactgcgcgaagctcagtgtttccgctctcgcgcctgtcggcgttcgttcggcgtcgctactcgaaggcccaccgggccttctcctcacgctccgcccgcaaaattgagctggcgccaggcttcgtagatggcgatggatgcgcagttggtgaggttcagggaacgcagggacgggcgcatgggcagccgcacttgttcggccacatgagggccctccatgatgtccatcgggtcggggatgtcgccgggctcggggccgaacagcaggatgtcagtcggcttgtattccacctcggtgtacagcttggtagcatgtgcggtgaacgcgatgatgcgcgaattgggcatggactccaccaggttgtcgaaattcgggtgcagcaccacgtgggccatgtcgtggtagtcgaggcctgctcggcgcagcttggtgtcgcgcaggttgaaacccaacggctccaccaaatgcaggatggtgccggtcaccgcgcacaggcggatggccgagccggtgttgccgggaatgcgcggtgagtagtagcacagatgcggtgttacggtttcggtggtggcggccttttcagccgagagcatcgcgtccaccacggagatggggttgccatgcgcgtcggttacgagttcgtccggtccgtaattcgatttacggtacccgtactcgaacatcttctcgacttttgtttcgggattctgtgcgttctgcgaattctgttctgcttcgttcgtcatagctgctaagaataagaacgatgaacgacacagcaatttctttgcgattgggcgcatggtgggaggccaatgcgcgcgatttgccatggcgcttcggccgggccacgccgtggggcgtgctggtatccgaagtcatgagccagcagacgcagatgagtcgtgtggtgccgtactggaccgactggatggcacgttggcccgacgcccgcgccctcgccgaggcccccaaggccgaggtgatcaccgcatgggggcggctcggctatccacgccgcgcattgcggttacaggaatgcgcccgcgtggtggctgaagattacgccgacaaactgccgcgcacgtatgacgaactcactgcattgcccggcatcggcgattacaccgcctccgcggtgatgagctttgcgttcggcgaacgaattgccgtgatcgataccaacattcgccgcgtgctgagccgcgtgttcctgggcgtcgaatcgcgcgggggagcgaccagcccggccgaacgcgcgctggcgaaccgcatgctgcccaaagacgagattctcgggtgcgatgctgacgtcgccgataatgccggtagcgccgaacatgtcgtgaacagcactatccgtggcggcaaacgctctcgactgcatcgtggcgagcgcccatcggtcacgtggaaccagtcggtgatggaactgggcgcggtgatctgcacggccaagtcgccgctgtgcgacacctgcccgattgcggacgactgtgcatttctcaaggccggccgccccggactgggggagcgccgcacccgcccacgccaacgattccaaggcacggatcgacaggtgcgcggtctggtgctcgccgcgctgcgcgagcttcccgctggagccacgttgcccagggaagatgccgacaagctttggaaggaccagattcagcttgccgcctgcatcgccagccttgacgatgacggcctgatagagattctggacggcggcctgcgactacccagctgacattgtgaaaaatggtgggctccccaagcgtgtatgggcgtggtgaccgtagactggaagagttatggcagtgcagaggaacacatcaggcgcgagaacggcacgcggagccggtaccggggccaatgggccatccggcgggcccgcccgaaacgaccgttccggcaagccgcgcaagcgcaggatcagcaaaaagcagcaggccatctatcgtcgtcggcgtatcgtggccggtacggtgttgctgctgataatcgcgctgattgtattctgcgtgtacagccttggccggggtatcggtgccgtgaacacgatgattcaccatgacgaggtgtatgcgatttcccgcgacgccacgccggctccgaagaaagtcagcaacgtcaaggattgctcggccagtgatgtgacattgcagctttccgcggcctcccaatccgtgccggtaggaggatcgcttgatttcaccgcgaccatcgtgcacgaggggtcaggcaactgtttagtggacgggtccgattccggccgtgtgctcaccattacttccggtcaggaaacgatttacaagtccgatgtgtgcccggcggattcacgtctgctgctgatggctaagggcgataaggacgttcagaaggtcacgtggaataccaatgcgaacgccacgctcgccaaatgcacggatgagtcaggttgggccaaagtcaatgcgggaacgtacgtggcgcagctgagtttgaaggatcatccgaaggtgaagagcgatccggtgacgtttacggtgcagtaaaagtcttgccttagcgctattcttttgactttgcatgaggtgtgtcatattgcgggcatgccgtcgacaatgaagcgtccgcataggcatatggtggccatgccggcgctcccaggggaattaccacatattagcgagcgataaggaacgtccattggctactgagtctacgacgaacaccaccaccatcatcgcacgcgccgaccagcatgatattgacctgcacaaggcgtcggatcgcgtgaacttcggctccatcaaggaacccatcgatgtgccctacctgctgggcgtgcagaccgacagcttcgattggctgatcggcaacgaacgctggaaggcgcgcgtcgaggaggacgaaaagaacggcactaacaccgtggcccacacctccggcctcgatgaggtcttcaacgagatctctccgatcgagaactttgcacagaccatgtccctgaccttctcggacccgtacttcgaggagccgcgccacaccgtgcaggagtgcaaggagaaggattacacctactccgctccgctgtacgtgaacgccgaattcgagaacggcgacaccggcgagatcaagtcccagaccgtgttcatgggcgacttcccgctgcagaccccgcacggtaccttcatcatcggcggcaccgagcgagtcatcgtctcccagctcgtgcgctccccgggcgtctacttcgatcgtcagcaggaccgcacctccgataaggaagttttcggcgcgaagatcatcccgagccgtggtgcatggctcgagttcgagatcgacaagaaggaccagccgcaggtgcgcgtggaccgcaagcgcaagcagtccgccatcgtgttccttatggccatcggcatgaccaagtccgagatcgcccaggcattcaaggactacccgctggtgctcgatgcactcgagaaggaaaccctcgagacccaggacgaggcactcgttgacctctaccgcaagattcgtccggccgacaccccgacccccgaggccggcaagaacctgctggactccttctacttcaacaccaagcgctacgatctggcccgtgtcggccgctacaagatcaaccgcaagctgggtgtcgaggccgatttcaacgatcgttccctccaccaggaagacatcatcgccacgatcaagtacctggtggccctgcacgacggtgcggcgaccttcccgggcaagcgcaacggcgaagacgttgacctgcgcgtggacgtcgacgatatcgaccacttcggcaaccgtcgtatccgccaggtcggcgagctgatccagaaccagctgcgtaccggtctgagccgtatggagcgcgtggtgcgcgagcgtatgaccactcaggacgccgaggccatcaccccacagtccctgatcaacatccgcccggtgaacgccaccatcaaggagttcttcggcacttcccagctctcccagttcatggaccagaacaacccgctgtccggtgtgacgaacaagcgtcgtctctccgcactgggccccggcggtctgtcccgcgaccgcgcctccatggaggtgcgcgacgtgcacccgtcccacttcggccgtatgtgcccgatcgagtctcctgaaggcccgaacatcggtctgatcggctccctggcaaccttcggccgcgtcaacccgttcggcttcatcgagaccccgtaccgcaaggtcgtcaacggccacgtgaccgacgaggtcgagtacatgaccgctgaccgcgatcttgaccacgtcatcgcccaggccaaccaggagctcgacgagaacggcaacttcgtgcagaagtccgcccttgcccgagtcggcgaagaagaggcggtcgatgtgccggtgagctccgtggactacatggacgtctccccgcgccagatggtctccctcggcgcctccctgatcccgttcctggagcatgatgagggccaccgtgcactgatgggtaccaacatgcagcgtcaggccgtgccgctgatcgaatccgagcgcccgttggtgggcaccggctccgaatggcgcgccgccaacgactccggcgacgtcatcaagtccgagaaggacggtgtggtcacctacgtgtccgccgacctgatccgcgtgatgaacgacgacggcaccaccagttcctacaagctggccaagttccaacgttccaaccagaccacctgctacaaccagcgcccgatcgtccacgacggcgagcgtgtggaagccggctcggttatggctgacggccccgccatccagaacggcgacctggccctgggcaagaacctgctcatcgccttcatgccttggaacggctacaactacgaggatgctgtgatcatctcccagcgcctcgtgcaggacgacaccctctcctccatccacatcgaggagtacgagatcgacgcccgcgaaaccaagctgggcgccgaagagatcacccgcgacctgccgaacgtcggcgaggacgccgtggccaacctcgacgagcgcggcatcatccgcatcggcgccgaggtcgaggccggcgacatcctggtcggtaaggtcaccccgaagggcgagaccgagctgaccccggaggagcgcctgctgcgcgccatcttcggcgagaagtcccgcgaggtgcgtgacacctccctgcgcgtgccccacggcgagaccggtaccgtcatcggtgtcaaggagatcacccgtgaggatgccgaggaggacggcgacgagctgcccaacggcgtcaaccagatgatccgcgtctacatcgcccagcaccgtaagatcacggtgggcgacaagctctccggccgccacggcaacaagggctgcatctcccgcatcctgccggaagaggacatgccgttcctggctgacggtactccggtcgacatcatgctgaacccgctgggtgtgccttcccgaatgaaccttggccaggtgctcgaactgcacctcggctggattgctcactccggttgggacatctctttggatccgaatctggaagccgagtggaagaagctgattccgtccggtgccgagaaggccgagccgaacaccccggtcgccaccccggtgttcgacggtgtcaagcctgaggtcctgaagggcctgctgtccaccacgctgccgaaccgcgacggcgaccgtctggtcggccccgacggcaaggccaccctgttcgatggccgtaccggtgagccgtacaccaagccgatttccgttggctacatgtacatgctgaagctgcaccacctggtcgacgacaagattcatgctcgttccaccggcccgtactccatgatcacccagcagccgctcggtggtaaggcccagttcggtggccagcgcttcggcgagatggaggtgtgggcccttgaggcctacggcgccgcctacacgctgcacgagatgatgaccaccaagtccgatgacgtcgacggccgcgtgcgtgtctacggtgccatcgtcaagggcgataacctgccgccggcaggcatccccgagtcgttcaaggtgctcctgaaggaaatgcagtccctgtccctgaacgtcgaagtgctcaacgccgaaggcgtggccatcgacatgaaggatgaggatgacgatccggccagctccgctgacgacctcggcttcaacatcggcgcccgccccgacgcggccgccaaggaagaccagaaggccgaagagcccgaataccagtgatccctcgggctgcatgcggtcaatacgccgcgtgtagctccgccaacgtgaaataaataacgtacagagacctttccggtttgcactacccctcagtcagccttggctgacagctcccctgacaaggggagcttgggaaggtctcaagaacagaaacggattaacaagtgctggacgtcaacgcatttgacaagattcgcatcggccttgccaccgccgatgacatccgtggttggagccacggtgaggtcaagaagcctgaaaccatcaactaccgtacgctgaagcctgagaaggacggtctgttcggcgaacagatcttcggcccgacccgtgactgggagtgcgcctgcggcaagtacaagcgcgtgcgcttcaagggcatcgtctgcgagcgatgcggcgtcgaagtgacccgcagccgcgtgcgccgtgagcgcatgggccacatcgagctcgccgccccggtgacgcacatctggttcttcaagggtgtgccttcccgcctcggctacctgctgaacgtcaccccgaaggacctggagcgcgtgatttacttcgcctcctacatggtcaccgaggtgaacgaagacgagcgtcacaacgatctgcccggcctgcaggacgagttcgattccgagatcaagcgccttgagcagcgccgtgactccgacatcgaagcccgcgccaagaaggtcgaagaggatctcgccgcccttgaggaggccggcgaggccaagggcccggcccgcaccaagttgcgtaacggtgccgagcgtgatatggctgccatccgcacccgctacaacgaccagatcgcccgtgtggacgccgtcttcgacaagttcaagaagctcaagcccggcgacatggtcgacgacgtggacctgtggcgcgagatgcaggaccgctacggcgattacttcgacggctgcatgggcgccgaagccatcaagaagcgcctgcagtccctcgacctggagaccatctccaaggaactgcgcgaggagatcaaggacgcttccgaacagcgtaagaccaaggccctgaagcgcctcaaggtcgtcaacgccttcctgaccaccggcaacaagccggaggccatggtgctcgacgtgatcccggtcatcccgccggacctgcgcccgatggtccagctcgacggtggccgcttcgccacctccgacctcaacgacctgtaccgccgtgtgatcaaccgtaacaaccgtctgaagcgactgatcgagctcggcgcccctgaaatcatgctcaacaacgagaagcgcatgctccaggaagccgtcgactccctgttcgacaacggccgtcgtggtcgcccggtcaccggtgcctccaaccgtccgctgaagtccctgtccgacatgctcaagggtaagcagggtcgtttccgtcagaacctgctcggtaagcgagtcgactactccggccgttccgtgatcgtggtcggcccgtccctgcgcatgcaccagtgcggtctgccgaagccgatggccctcgagctgttcaagccgttcgtcatcaagcgcctcgtggacctgaactatgcgcagaacatgaagtccgccaagcgtcttgtggaccgcggcgacgccgaagtgtggggcgtgctcgaggaggtcatctccgagcaccccgtgctgctcaaccgtgcacctacgctgcaccgtctgggtattcaggcattcgagccgatcctggtggaaggcaaggccatccacctgccgccgctggcctgcgccgccttcaacgccgacttcgatggtgaccagatggcagtccacctgccgctctccgccgaagcccaggccgaggcccgctcgctgatgatggcttccgacaacatcctgaagccggccgacggccacaccgtgaccatgccgagccaggatatgatcctcggtttgtactacctgtccaccgtgctggaaggcgtcaagggccagggccgcgtgttctcctcgctggaagaggccgaaatggccctcgaccgccacgagatcgacatgcaggccaaggtgctcatccgcctgcccgagagcttcgtgctgccgaagaactgggagcccggcgaagtcaaggtgctcgacccgcgcgaaggcgaggacgaggtcgtcaaggaagaacgcttccacgacggcactgtgctgttcgccacctcctacggccgcatcctgttcaacgagaccctgccgaccgactacccgttcgtcaacgagcaggtggccaagggccgtctgtccaagatcgtcgatgacatcgccatgcgttactccacccagcaggtggccgccacgctggatgccctgaaggatctcggcttcacccgcgcaccgtggtccggcgtgtccttcgcgttctccgacgtgaacgagccgcctgagcgcgacgagaagatcgccgagtacgaggccaaggccgacaaggtcaacgccaactacgagatgggtctgttgaccgaggaagctcgccgtcaggaactcatcgacctgtggaccgagtgcaccgccgaagtgtccaaggaagtcgaggagaagttcgacccgacctccaacctggccatcatcgtgcagtctggtgcacgaggcaacatgatgcagatcaaccagattgcaggtatgcgaggcctcgtggctaacccgaagggtgagatcattcctcgtcctgtgaagtccaactaccgcgacggcctgtccgtgctggagtacttcatctcccagcacggtgcacgtaagggtctggccgataccgcactgcgtaccgcagaatccggttacctgacccgtcgtctggtcgacgtctcccaggacgtcatcgtgcgcgaagaggactgcggcaccaaggccggtctgcccatccgcgtcgccgagcgcgacaacgacggcaacctggtgctcgtcaaggccgccgacggtggcccgtactcccgtctgctcgccgccgacgtcatcgacccggccgacggacagaccgtgctgtacaagcgcgacgacgccctgtccatggacgtgctcaacgacctcgtggcccacggcgtcgaggaagtcaagtgccgttccgtgctgacctgcgagtccaagcgcggcgtgtgcgccaagtgctacggctggtccctggccaccaacaagctggtcgatgtcggcgagaccgtcggtatcgtcgccgcccagtccatcggtgagcctggtacccagctgacgctgcgttccttccactccggtggtgtggccgcggcctccgatatcacccagggtcttccccgtgtcaccgagcttttcgaggcccgcaccccgaagggtgaggccccgatcaccgagttcgccggcagcatcaagatcgtggagaacgatcgcggtcgccagatcatcctgaccccggacgccgattccggcgcaccgaaggaagacggtgtgatcaagccgatcacctaccaggtctccaagcgcgtgccgctcaaggttgccgacggcgaccacatcaaggtcggcacccagctggtcgaaggttctgtggaccccaagaagatcctcaccatcctcggcaagcgcgccgcccaggtcaacatcgtggaggaagtgcacaccgtgtaccgctcccagggtgtggatatccacgacaagcacatcgaggtcatcgtgcaccagatgacccgtcgcgtgaccatcatcgactccggcgacaccgacctgctgccgggtgagctggtggacaacgcccgcttccgcgagatcaaccgcaacatcgtcaagaacggtggccgtccggccgtcggtcgtccggcgcttatgggtatcaccaaggcgtcgctggccaccgactcctggctgtccgccgcatccttccaggagaccacccgcgtgctcaccgaagccgccctctccgagaaggtcgacgacctcaagggcctcaaggagaacgtcatcatcggtaagctcatcccggccggtacgggcctcgcgcgctaccgcaacgccgtggtcgagcctgacaaggccatccgcgacaccatctacccgaacttcggtctgggcggcgatggcgatctcggcgacgcgagcttctccgacgccgacctgtctgacctgaacttctcgaacctcgagttcggcgatctgaagctcggcgacgacttcaacccggatgatttctactccgatcagggcggtcagcctgacatcgaggagtaagtgagaaggtcctagaaaggatgccccttctaggactcagatcttgcgttaatcgcaataagatggcccggaactatatcagttccgggccatccgtatatttgccattgtgattttcctgttgaacaagagcaggcagccgctcgttgcttgattactcaagcctgtttttcggtgaactggaagaactggtctccgatacgcaccgtggcaggcgcgctgagcttgagcggtgtgcccttggtgacttgtgtctcttggccattggtgatgatgtaggtgccgttcaacgagccgtagtcctcgatccacagcgcgccatcggtgtcgatgctgatggcggcatggttgcgggatgtggtgcgggtcgggtctacgatacgcaccgccttggcaccctgcggcacatccatggaaggcttgcggcccagcaacgtgctcttatcgatcacgatggtctggccggtgacatcgttatgcagcaggtacgtcttcttcggtgccttggacgtgaacgaggaggagagcacggtgctgtcccaatcctcgatgtcgttttcggcggcgtgcggtgtggtgtctgccggagcggtggcagcgggctcagcggcggcggccgtggcggcaggctctgcggtaaaagcggtattggttgccgcttccgcggtactgggctgcccgtagtcgttctgcggttcggctgtgccaactgcggaatccggggtgccttccaccggatcgtcagaataccaacccagttcaggtgctggagggtagggaagtttggccatgatgatgccgtcctttcactgacgggaagccagagcggcgttgattgccgggtcgccgagctggcccagccattcgatcagtgccggataggtgttgggattacgtgcgatgcaggcgcgtagttcaggcgcgtactgggcaatctgggcgatttgcatctggtcggtggtggtcagggcctgttcggcggtgaaaccgtaaggattggtggccacaggctcctcgaatgccgcctgagccgcgggctgctgagcctgttcggcggcgggctgctgggccgcctgtgccgtggctttctgatcctgaaccgggccgccgaatgcctcggcagtgaacccgtattgcgccagggtctcgcgggcgcgatcgtcaccgaactcggcgatccaacgcttcaagccgggataacagcgcggattcacggcgacattggcaccgaattccggattctcgtaggcgatttttgccaacagaatcggatccgcgttcggatcttgtacggcagcgaccgcagcatcataatcaaccatgggattacctccttatgttcgctcggttatgccgaacgtatggtccgtagtgtttgtagtgttgcgtcttcaatggcgccgatatcctcaccttcgtccagcctgaatgcgctgaacgcatgatgttcgggttcggtcaatggcatatcggccacaatcacagtgatattgtcggttccgcccgcatcaagagcggccgccaccaaggcgtccacggcctcctgcggactggaatgcgccgcggcgatggccgcgatctgttcgtccggcacctcgccatgcaatccatccgaacagatgatgaagcggccggtcagatcggcgacatatacgtcgggcatgatgccatccggatcacccagacattgtgtgatgatgttgcgtggaatggtcgcctccgcctcttccggcaacatctgcccggaatcgatggcttcctgacgttgcgaatggtctcgcgtgatgcggatcagcgaagcggcgtcccacacgggaatgatatccgtggcgggagcatcggcatgcgccaacggactgagatggtaggtgcgggaatcgccaacattgaccacataggtctggtccgagaagtcctgatcatcggcgtcactgaacaaagcagcgctgcgggcgctggcggaatccgcatgatcttggggcagtaccaaaccggagcaggttgtgccggccacgccgccaaggcggtctcccagatcgagaatgtcgtgctgggcccgtgccaaggtgtcgtcgatatcctgacgggtgcgtgaaggcatggcggccaattgtgcgaaatgctgggcagccaactggcttgcctgctcgccgcctttgccgccgcccatgccgtcacagaccatgaacacgccttgttgcgcgaatccggtgtcttggttgtttttgcgcctaagacccacgtcactggtcatcgcgatacggatggagcctgtggtcatgacgccttccccttcttacgcgtgcgcttgacatgcgtcgtgtgcggctttgctgcgtgcccatttgacagtatagccacgcttttcagggaaagtcgtgtacgtatcctcctgaaacgcggcaaagaagcgagcattgccttgcgtaattggtcgactcctgtccaatatgtggtggcttggcccgattcaatgtcttgccccgagaacgtggcgtagtcggcttcccggccaagctggatcaaagcctggtcatctgtgccgagttgacgggcgatggcaccggcctgatctcgacgagtgcccttggctgtgatgccgctttgctcggcaagcatgcgtatggcattccaacctgctgccacacgggctttcggactgccatgccgccgcgctcgtgccagcagtatggccttgaacatcagaatcagaccgcaggcgatgagtagggtccacaatgggctgccgtacagggccaccttgcgggtcactcgccagaaccgcgcccagaacaggttggtcggcgaatcatcggcgtcggcgccggccaatgagctttggcccttggcttgcgtctgatcgcgcagcggatcggtcaacggcactggtggttgccggaccagcgtctgcggattcggcggcgtcaggttctggttttcatcaggcatcttggtctccttgggcgtcggatagaacgccacccatcccaggccctgcaatttgatttccacccaagcggtgacatcgttgccggtgaattcgattttggtgccattgcccgaggtcttctccgtgcgggcatcggtgatttcgccatcctcgtttttcggcaggaagcccaggaccacacgggagggcagtcccagatcacgagccatcagtgccatggcggaggcatattgctcggagtcgcccaccatggccgtgcctgccagcagcttgttgatgcggtagttgccatggccggcatcggagggatggtcgccttcaagtccatgagagaaccatccggagtctttcaatgtgtcagccaacgccgtggctgcggcaccgcccgaggactgcccgccggcaatggacgtggccagtttgctggccgaatcgggaacatcctgggcttctggttgggtgatgcgggccgcagccgcactgctgatctgcttatcggtgggcttgcgggcgataatgccggattcggtataggtgaggcctttacgcgtgccggcgggaataatggcggaatcggtatccgtgttgtagtaaaacgtgtcattgccgttgtcggcatcgttggcgaagctcacgccagtggccgctcccgccagcggcagccaggtgtcggtcagttcctgatcgacggtgaaggtcgcagtgaaggatttaccctgctcatccgccttgatcgtggtgcccacgcgatgataattcgaggagtccgtggcttcggaagaatcggacaggttccatactgtgccatcgaatcgatccatcaccgcaagtttgaccggtgttccggccggcagattatgaacggtcagcaacacgtcttttttgtggtccttgatataggatcgcatgccgctgagcgggctggtgtaatcgtaggggcttaacggcggatcgtagcggtcacgcagcacgaaacggtcctgtggcaccagcaacgtgcccccgaaagcaaggccggcagcgagcacgacgatgatcagcgcggatatccagcgccccccttccagcagttcaagacgccaagacagccagataatcagcagcaaggcaaaggcaataccgcagatggcgcgttgccagccgctgtctgtgcccagcagggcacatacggccacggccgccgcaaggggcagcactcccaccagagacaaccatgcgttggcattaatggcaaacacgccggtgaagaacgtaagccacaggccgatggtccataccgccatcagcacgccgtcttgcgtgcccagaggcggatcaacggaaataatgtacttgaacgagccaaacgtcatttcccaacctgaactcaaggtcttcaaggtgggaatcacgtaatgggacgtagtggaactcagcgttaccaccgggccgatgatgaattgggcaaacgccagaaacacgatttgccaccacagtcgcaacgccggcaacatgcccgccagagcgatgatcgcgcccagcaaggtggccggtacagcggcaatcgcccaagtggccacgccgccgtacacgtcgatgagattggcttgcgccagcaacatcatcgccgctatgagtacgaggctggcgattcgtttgccccacggctggcgactgaggcccatgccgcgaagcacattgcctctggtcatccagataaccgaatgtgtggagtcggcccaggagccggtggtggtggaggtcccggtgtacgtgccggaggaagtgccggtgtatgtgccgctcgatccggcgtacgcagcggtattggtattggtgatactggactggtcgaaggtcatgcgagcacccccatgatcagcgggagatcatcgaggtcgccgatggtggccaatgtgaagttggcgaatcttctgatgccgcgattggcgccggcgctggcctgcaataccacgcagctggccgatcggggcaaggccaaggtcatgcgcttgatttgctcgatgtctttcagcgatccaacagtgaaaaaatagaacgaagcatcaggactgtgcttcagcgtgccctcggcgagattcggattatcctcacgatcaggctctatggcactggcgttgtcgaggaactccatggcgttgcgcggctggccgtgcgcgttgcccgcgtggcagaacaatggacgatcctgcagcaggcatttgacgccgatggaggagtggatggacaccgccatctcgaattcctcgccgttgacgtattcgtccgggttcacgctgatggtcaccgaggtgtcggtgcggcgcgtggcctcatattggcgaatcatcaacgtgccggttttcgcggagctcagccagtggacgttacgcacgtcgtcgcccggctcgtattcgcgcaatccgtagaagtcgagatcatcatccacgatctggccggatggttggccttccaggtcgcggggcacgccggcattcagagtatcgagacgcacggtacgagggtggatgaatacggtgatgcggtcggccagctccttttcgtgacgcaccagaccgaacgggtctcccttgcggatgcgcaatgggccgatgggcagtattgcgcgcgatacggtacggaactccacatcggtttgcttggattgcccgggagccagcatggggatgttgaatcgttcatgcgcatcgccgattggcagatatccgcgtgccgtggtcgtcggcgttctgccggtgttgtcgatgccgacgataacggatacggtgtctcccacggtcacgcgatgattggatacgacgatggacgcgtggaagcgtgtgttgccgagggaaagcacgattgccgcgagcatcatcaccatcgccacgatgccgaatacgagcagctcataccagcccagaaacgggaacgcaataaggcgtgcgatgcctgcgcccgttaccgcccagcccaagggcgagacgtaggatgcgaagaaccgtctgatgcgtcttaccgcgcgcttgaacatgcgttcagcgcgccggcgacggcgtaatgcggcggatgtagatgccatggtcggatacctttccgggccctatcaggaaccgatggtgggggagggaacgtcttcgagcacctgtgcgatcaggctttccggagtcgcgccatcgaaggtggcttccggagtcagcgtgatacggtgtgcgagcacggccactgcaaggtccttgacgtcatccggcaccacgtaggcacggccatcggccgcggcccagatacgggcgcatcgggtcagtgccaaagcgccacgcatggaggagccgaccgtgatcttctcgttgtggcgggtcgcctcgacgagcctgacgatgtattcacgaatcgcatcatccacatagatttcggtggccacctgacgcagccgcatgacatcgtcaccgctcagcaccggggaaatggtctgcgcacggtcggtgatatcgacctgcttgaggatatcgacggacacatcatggcccgggtagccgattgacgtcttgataaggaatcggtccatctgcgcctcaggcagcttataggtaccgagctgctcgatggggttctgggttgcgatcacgataaacggctgcggcacatcatgtgtgacgccgtcaacggtgactttctgctcttccataacctccagaagtgcggactgcgtcttcggcgatgcacggttgatctcatcggccagcacgatggaggcgaaaatcgggccttcgcggaactcaaattctccgcgcttctgatcgtagaaagtcacacccaccacatccgaaggcagcagatcgggcgtgaactgaacacgcttgaaaccggtggaaatggaattggccaagcctcgggccaactgggtcttaccggtgccggggttgtcttcaagcagaatatggccaccgaccatcagtgcggtgacgcattgcttgatagggatggtcttgccgataaccaccttggagacattttcgaccagcgcattgaaggactgctggaaatcccggacctgagccgtgggctggggcagtagtccggaattgatgctggcgggcagtgccgatgcggctgcttgcgcggctttgctcgactgacgctgcggctgtgattgcggctgggattgcgcggtggcctgctgcgggatggctggcgtcgatcccttgcgcggcttgagcacggtgctgtcatcgcccgcaggaatggaggcggcatcagtagtaggagacggcttttctgacggcgcttgtgacggccgctgcggcaggttaggcagcgcaacggactgcggcgccgactcggtgcttggggtcgtgccggtgtgtggtgcggatgccaggtgcgtggcgtcggacaagtgcgtgctgtcggatagctgcgtgctgtcggacagacgggtcgtgtcagacaactgcgtcgcgtcatcgatgttctcgctcatggatgttctcctactgcttgtgaatggtggttgacgatattggggtattgccgaaaccaagaatccaggggttcttggccaaagtggtgacatcggtaccggatttgagcgacttggtcccctccgaggagtcagagggacgtgtgcccgcgacgctgcctccgtccgcagtgttgtcgagaccggagtatcccggcccgccggtgactttgacgctccacgcgtagttgccatcggcggccacggccaagtcggtgacatccaatggctggccggagttccacgtgaacggttggccattgatgatgatttgtacagtggccgacttgccatagacatcaaccgaaccgccggtgacgttaatgacgtgagcgttgtctgaccagcgcagctcctgcggtttgttgattacagccttcttctcataggtgtaaggagcgccattgtgcgggcctccggtgacggcgtcgctggtagcgccgttgaacacctgttgcaccgatgcggtgttgcatttggcccaaggactcattcggaagtcgagtgagttccggttagtagctgtaccggaatcgatgccatcggcagtcacgctgtaggactgcgcatgtccctgcttggtccaatgcacggtgcatgtactgccggatccggtggtgtagacgtcagtgggcggctggaccttgtactgcgggacaaagctgctcttgcccgtgccggaggaagcatcgcgctgcggcaccacggtggccgttacggtgatttcccgggtgttcaaatcgttctcattgatatcgaacgtagcgccactgtcactgcaatcgatggtgtccttgacgtctcctcccaaggaaattcgccggcagccggcattgcggttattgccgagagtgactttcgccgttaccgtggtgtcgtcgttcgacaacgcaatgttcggcgcatccgggtctccccagatcttctctgacggcgatgcggcggactcggcactccaattgattttgttatgggctttgacggtcgccgtaatggcggtgccatcggaaatgtcgttgttgttgaacgtaaacgacagctcggtggccgtattgccggtttccttggtctgcggagcacctgcaccggtgacggtcactgaatagttgtcgacggcgctgaaatcaccgctcggcgctttccacgtcaccttggcggttttattgccacctgtgaccgtaacatcggtgggagcggacggcaccttgttcggtgtggcttcgacggcggtggacggcttggaccagccgacgtcatttcgcgcggcgacggtgaaggaataggttttgccgttcttcagaccagtgacctggcatgaggtgacggtaccgcaatccttctctccggtgacggcaccggtccaactgaccttgtagttggtgatcgggctgccattggcggcaccgggcgtccatgtgaggctgaccgcgctgtcctgcggttccccggctacgggagagagcagtggcggctcgggcttgtcgatcacggacacggtaatcgatgcggtgacttcacgatccttggacttggtgccgtcttgcacggtgacgagcacggtgttcgtggaagcacctacatcggatgcgacggcgatggtgatgtttccggaggcatcgcatccggcgatggtgagtttggcggcgtcatccgccttgcagctgatgacggtcagcgaggaatcggggaacggattgtacgcgccggtaagcacgttcacggcatcgctggcaccggccttgatcttcaacgtcttgttgccgacgcgtgtcagcggacgggtcgaagacactacgcgcacggtcacaccggcattcacggtgcccgcgccgtatgcgatttgcacgggaatggacgcggtggtgccaggagcggcatccttggtggcggaaacctgcaagctaccggaacgggacaggtttgcggtgatttgcctggatgatgagcttccaccggaatacgtgtattgcttttcgtcgtcatacacgccggacggtgcatgggtgagcgccgtcagatcaacggtcttggggtccgcgcccgcctcgacatcaatagtggaggacgagaacgtgggcggcggcacatcgcggcctatcaccgtgatctggagagtgatcactgcggaattgatgatcttggtcttatccgatccctgcttgccatccacagcggtaaaggtaatggaggcggggcctgcgtagtcttttgccgcagtgaacttcagggtcttgtcgttcacgtagaaatcggagttggaagccttggtggcgctgacggaatcagcgctttcgatatacggttccttgccggcgccgacgcggacatagtcattgatgttgatttcaatggtctcgcgcgagttgaccttcaattccggtgccttgggacgcagcgtgggcggaaagacaccataggccggtacctggatgaacgcggtggaggtgatgttgtatttcgtattggtcaccgtgtaaggcacggctcgcgcctgtgacgtcaggtcgacggtgatggtggtcgaatgctcgccgcccttgacgtgagcgtgagcgctggcggagggatgcacgccgaccttgagctcattggctgtgccggaaggattggcgatccactgggaaacatccacatccacggacttcttatcgatggtggcggcggacggcacacgatagtcgtaggcggtaggcggctcgatggcggcactcggatccacgtttaccgtgagggtggccgtatcggacaagccggccttgtctttgaccgtgtaggcgatatagtcggtggtggcgctgccgggcgtggtgaaggagatcatattgtctttcacgctcaccccgtcgagaccttggacctcgacatgcttgtcgacggtcagattggtgttgtcgccggagatgtcgttctgcgcgaccggcacggttgcggccgtattgggcctcaacgtgatttcgtcatccctggcgtatacgccggagtcggacgatccttggaatacgcccacgcggatctgcgcctgtgcgcgctgaccggtccaatcctccacggcataggagaaggtgtcggtgccggacgaatccggatacgcttcatagaccaagtagtcggaaccgacttcggatatgcggcccagcgtgggtgccttgttgcccagacccaacagctgatcgtcgtcgccatccgtgtctatgccggtcagtgtgatggggatgcggaccttctgcccggcggcaacctgcgcttcggcgtcatgcggggttggcgcggccttgctcgctgcgtcgctcttatgcacggtaatggtgatattggcggaagccacattacccagattgtcttcaaccgtataggtgatggggaagttgccggtctcgctggatgcttggtagcggaccgtgtctccagagacgaaggccagacccttgaacgtccccttgtcgtattgcaggttgttcttgagtttgaccgtggtgccatccgagtaggccacatggtcaagcacatccacggacacgatgccgtcggtacgcacctgggcattgatattgctggccttgggcactgaattcgaggtggccagagccggcggctgcaacacgatggtgcccttggcggttccggaggcgttggccacggtgtaggtaagggcgacgggcttcgtgggcacctgacgcgcggtgatatacacgcgcttatggctgacgagaccaaccttgatgccggagtcggccggtgcgctcaccgtggtgacggacagcacaccgcccatcggatcgacgtcattggtgagcggctccacaatggcggtattatccgcgccaagcagggcgacatcgttggcggcaaccggtttggcggcctcgccggtggcaggctgcacctcgactcgagccaatccggtggccggaatcgaaccttgagtaatgatgtagggcacataataggtgccgggattggtggccttgaacgtcaacgacatatccgccgcattggtggtcgtcgaagcgccgttgggcgtatccacctgagtcagttgtgccggctgcaaggaagtgccatgcacataagaggacagcttgacgacggtatccgtgttgggaacggtggttttcgctaccgggtcgatgaccgcggccaaggtgttcgcgggcttgaccgagaaatacaccatgccggtgccggttgccgtgccgtcggagacggtgacctcgacgcccacacgtcccgacgccagcgcaccggtgttgaacgtaagctggccgtcggctcgggtggacacctgcacctggtcggtgttctgggccacagcggagaccagagtgagcgggtctccatccggatcgttgaagctgctcagcgcattggcggtataactggctccctgctccacatcgatctcgggaggagtgtcgaactgtacgggagcgtggttgcctccatcattcagggttacggtcaccgtggcggaagaggtctggccgcgaccatcggaaatatcgtaagtaaaggtaacggtgcctgcggatgcggcggaggcatcgagttgcagataccggccgtcgtaaatcggcgaaatggtgacgtctttgttgtttggtgcgccaaccttggtgattttcagtacggaacaatcggtctgctcgtcattgcgcagcgcgtcgagaatctgttccgaaccggctcgtgcgccgatttcatcatcctcggctttgatttggccggattgtgcggaacaggtcttggagaagtcgtggtggttgttggccgagtcgttgttctgctgttctttctcggtctgctcggtctgtattttgttccactgtattttgatgactttggtggaatcctcagggttccacacattgccgttaaccgtgtcgttgagcaccacaaggcgatggttggtgcggaacaccaattcggaagtagtattgacggattcgagggtttgcggcttgacgctggtatccgtgggggagcaggcgcgaatgtagttgctggccttctggctccaagccgagtacacgcagcccttggacgataccggtcgtgctggattcgccttgcccccgttggctatgaaattcgccttggcattggacttcaacgggataagcgcaaggcctctcggtgatgccgcggccacccaatcggactgtatgtcatcggtgggaggctcctgaagggtgagggtgccggtcgtgtcgacatcgacgcggccgcccttgaatatgacggttttgccggttgcgattaccggcgtgctcccgatgacggtaaagctttcaacggtctgctgcttgccgtcggtcagcgattcgagggttttggccttggcgctgctgggattgtcaagacgcagcaccataccgtcggatggacggtatccgtagaccttgccatcgtgggctactgcgatgcgcccgccctcgcccagctttattttcggatcggaagtggtgggggtcacggaatcaaggttttccgacaagccggtccacacattgccggtcttctcgttgatcagggctgcggtatccccgccgaccacagtggtggtgttggctttgatgtcggtcttgacaccggtgctgaccgtggatgccttgatggtggaggctttggtcgtttcggtcaggatggtgtcgccattatgctgtgcgatgtcgaatcgtggggcggaggaggagacgccggcgtcggcctccttgttctttacgttgaatcgtgcggccttctggtttttcagcgaagtgacccatacggtgccatcgtccagttgcacatggcggcgcgtgacggtgctcatgatcaccgcgccggcaacaagtcccagaagcagcaggagcgtgattacgggaaccgtccacgtatgccctccggagggcataaggcggcgcaaagccgcgctgatgcgtcggcgacgatcgtatgactgggacgatgtggccatctgaactccctgacccctgttttctctggttgctggtgtaatgacaacgctttacggttccaatacctgccgttcctgttgtccatttggtgaattcgccgctgctgggcgcacgtctgatgcgatacgcaatgccagggtggcatgcccggcagtggcgagcggatcattcttgcggcttggccgcacaggcgatggcggggctgacggacatctggcggttcttgcgcacaatggacacctgaatgcaggtctgcgagccttcctgcgcgttgacggtcaccgtgggatctgacgttgtgacggtttgcgcgctctggtcggtattgctgccctgcactatggcccacgcataggtatcaccgctttgcgggtctggattcgtccaggtgaacgtcacggatgacccatccgccgcataggtgccgttcagattctccggggaaggaatctgggcgttcgcggtatcggtgatcacgtcatcctgattattgcggttgttgtcatcatccttggtgccgggcgtcgccacctgtttggtatctgatccggtggcgctgtccatgcggggaacgaccacgaaggcgaatatcagtgccgctgcggtgatcgccgcaagtataccgacggtaatacccaccggtttgacccatcgccgtgacgaacgggtgatctgatctcgctggtccgtggcccggcgccgacgctcgatgtctttgggataggccggcatcccttccacggtaacgggagtggcatgcccgaaatatgcgaattgcacacgctgcatggcacgtgcgaactccaacgcggagtagtaccgctggtcggggtccttgttcagggcccggcgcagcaccgcttccacatcggccggcacgtcggggcggttgaggcgaggcaatggctggttgacgatcagcgaaatcagttccgattgcgaacgcgggtgataatcgtgctggaatggcgagcagccgacgaacatggcgtacagggtggccgccagtgaatagatgtcggcggcttccgaaccattggtcagatgctgaagcacctcaggcggtgcccacggcggcgagaatccggtttcggtgcggtcatacacatcggtggagataccgaaatcacccagaacaggcaagccctgcgaggtgatgagaatgttgctgggcttgatgtcgtgatggatgatattgctgcgatgcgcggtgaacagcgcgcttgacagcttgatgccgaggtcgagtacctgctcgcaggtcatggaccgggccttcatgatgctgttgtaggtgccgcccggcgcatattcgatgacgatgtagccatggccatcggaggtgacgccggcaccatataccggcagaatgtacgggtgggatgacagcttggccatgaagttggcctcgcggttgaacagggcagcggcccgtgggtcaagggttttggcgctggcctttaccgccaccgggcgtgcgggcatacgctggttatataggtacaccgtggcggtggcaccgcttcccaacatctggacgaaatcatatccgggcagcttcggcggtctcatcggaatgttgtccatctgttccctccctccttggaaaatgcgctctccctgcattcgttctacaggataccgtcaagggtacgattcttcgtcgggttcggtaaaatttttccctctgtgacggtcgggtttaggctggagccatgatgacgagacttgaacctggaacagtgctggacggcatcgaccgtgatggagcggcgaggctgattgtcggcacgcctggaagcggcaaaactgaattcgccttatcggtgttgatggcggggctgcgccgctacggtggcacgcaggcggtgatggccgtatccggccgtgtggccgccgacgcattgggcaatcgggtgattcgtgagctcgggttttccgtgcaggccaggccggtcaccacgctgggtgccgtggcattccgggccatatcggcttcgcgcgagggaactggattgccgtcgcctcgattgctgaacggtgcggaacaggatgctttgctgcgtcaagtcatggccgtgcatctgcgccatgccgtagcgggagatgattgcggcacctgtgatttgctgcgcgtctactttgcccaggatgactgggcgagactcatacgcgatgccggtgccggcgagatgcccggctcggccgcttccgcacaatcaagcctctcgcaacaagggtcggattcgccgtctccgacgtcggcaggcggctcgaccagcgcggataggttcacgcgaggtatttcagatgcgtttatcagccagttgcgcgatatgctggcccgattggatgagctcggtgtaggcgttcacgaagagccacgtctcttggacgccgtgacggaggacgcgcgattgtcggtgcaatggcgtttggctttcgcgttgcgccgtgaatatattgcagcccaaagcgcggtatatccggggcaataccgtttggatgcctcgtatttgctggtggcaggcgctcgtgtggtgcgtgaggcattcgccgccgatcacgcggatgattccgaccggcctatgtgtgtggaggcgttgggcttgccccggctgctggttgtggatgatgttcaagacaccacgctggccggcatgcgcttcttggaggagttggggaatgccggcgtcaagttggtgctggtcggcaacccggatgaatcggtgcagaccttccgcggatcgtatccggaatatctgatgcgccgtgccgtggaagggcggctgaaggccaaggaagaacagctggttggcggcagtgccgtcgctgatcagtcgcacatgacgatggctgatgtgatcgcgtctcgtatttcgctgtcgattccctcgccggaagacgagccgctgcctccggccgagcgtcccggcaagctgaccgccatactgggcggagtcgatgcagcgaattatcaggcggacggcacggtgaccgccggcctgtaccgatcctcacgtgaggagctggatgatgtggtctggcgcatcaagcgggcgcatcttgaccggcatattcggtggaacgacatggcggtcatcacccacgacaatgccgccgtgcggctgttcggcgaacgactgcgccgagatggtgtaccggtgcggtattcgtcggtcacccgtcctttgaaggacgagactttcgtgcagggattgttcgcgcttgtggagcttgcccgattgcgtgccgaggggatggcggaatgccagatgacgttggcttcctgcgcggcatatataaggactagagtggccacgttgatgaacggcccgttggtgagtgccggggccaaacccggtcaggggcgtcccgcaaggcttgcgccgatcgaatcggccatggggtcgttggagtcgctggcgtatctcgccacggatgatgccatgctgacctctctgacgacggcatgggaaacattgcgtgaaacataccatgaaacacggcgtgaaacaggtcgtgaaacatcctcgtcagtggtttcgacgtcagcggtttcgtcgtcagtgacttcgttgccagtgtctgtcgaaatactcggtgaaccgtccggcgatgacttggcctttggcgttgacgcgctgtacgtgatgcttgccattgatgatgccgccgcgccggcgcaggctgcgctcgcatccatccacgcggtgctcggcaacgaccctcaggcccgcgcttttgcgaacctgtggcatctggtgggcagcgttgcttccggcttggagcggctgccggcaagccagcgcgtacagccgcgctatgcgctgtctgttgcgtggaacgccaccggtctggcaccggtctggcagcgtgcggcattattcaacacggcagaggggcgtacggccaatgaccggctggacgcggcaatgcgcctgttccagttcgccgatgattccaccgccagtcgagacatcacgtcattcatggcacaggttcggggcatggaagtgcaggccgattccttggcccacataggaccggtggaagacgcggtgacattgactacgccggcaggcgcggccggacgccactgggaatatgcgtggataccggtggtccagcaagacgtgtggccgaacctcgccgggcgcaacaccatgttcggtggtgaagaccttgccgagctcgtgctgaggggagcgcttgaagaaagcgacaaaaccgggcatgatccgcggttcgcggctgtattgtcgggcgagaagaagagtttcctggtcgcgctgacccgtgcacggcgaatcatgatcagcgcggtatggaacgacagcatgagcccctcggactttctcttcgggtatctgccggaatactatccgcgcaaccggcaacaggcgcctttcaccacagtgggggcacatgcgggattcgccgaatatgatctggccggattggacgccgacccacgtgggttggtcagcgccgcccgcgcggttctggccactgctcaaccgcagcaggctgccgcaaaggacgccgcgattgcgttgacactcctgttagagcatggtgtgcgcgccgcaaatccgcagagctgggcgtttgtggaatcgccggcccaatcggatagcgcgtcatctggcggtgcgtcatctggcggtgcgtcatctggcgatacctcatctgacagtgcctcatccgacagcgcgtcatctggtggtgtacagcctgacggtatccaaacagggaaaggcaagacggatgcgcaggccgcgcccatggtcaccttatctccatcggcggtcgacagcctatgggcgtgcccggtgtgctggatgctggagaaccggttcgccggtcctcgccccagctccgtggccaccagtttcggaaccctcatccatgcggttgcgcagcaaggcagcgaggaagggctggaccatctttcccacaatgcccaggcgttggccgcactgggcttggactccacggccggcacggaacgtcgcatcgaggctgtctcggcacggcttaatgccatctatcagagcaaacgtcctgatccgaatgccatagccgacacccggaaccgctatgaggccacccgtaaggacgagtccgcggcggataccctgcgcaacatcgccgattactttgtgcgcagcgacgccgatccggaaacgtatcttggcaagaactccagcaacttcagcattggcgcattggccggtgccgaatgcgaacgggagtttgccgcacgattcgatgtgcgtgacatactcgacgcatacaatgccgtgcccggcctgcacccaatcggtcggaacacgctggtccgtctgatgggagcactggtcggagggtggccggaaggcatggacgagcatctgaccgtgagactgtccgggcgcatcgaccgtatggaaacccgcgtactcgcagacggcggcgaatgcattcgcctcattgactacaaaacaggcagaacgcccacggtcaaacagattttcaatgatttgcagctcgtgtgctatcagcttggcctcgtgttccccgaagacgggccgcgcggtgccaaggcacttgccgcaatgccgcatatcagccaaagcgtgctattccatgtcgggcagaatgcggcaccagccagaagctacgctccggaaggtgccttccagccgccgctgttcactgatggctcgttgaatgccgaaccgttcacgccccgatactggtataaagaccccaaccgtttcttcgacatacccgccatagatccggctactcctcccgaaggtgtgagtgccgaagcgtgggcgcaattcgccgcgctcgccggtacgcagacgttatggtcgctgaccatgatcgcccgcgtattctatgccgcggcggccagcagatcagccatcatcgaggcccatccgcaagacacccatatcggattctgccgtatgaagaacgtctgccctgcctgtgcaggccagatcgacacgattttcgaaacgaggcaagcatgagcacgttcactcccagtgcggaacaggccgccatcatcgatgcgccagtcgatgctgacgtattggtggttgccggtgccggttccggcaaaacctttacgatgacccaacgcatcatcgcgcttatcaatcgaggtgtggcacctgaacgcatcctgggcctgaccttcacacgcaaggccgcaggcgaactgctggaacgcgtctccgccgcagtggccggtgatatggcgggctctacgaccgccacggtgtctgatcgggcattcctcaagccggccattttcacgtatgacgccttcttccagaccatcgtgcgccaatatggactgcttgtcggattcgatcagaacacgcaaccattgagcgcagccggagcgcttcaactggccaccgaagtcatcgacagtcacatggatctggcgttcagtgaggattttggcgccttctccagtttggcgaaccgtgttctggcgttgtcggatgccattggcagtgccatgatcggtgccggctgcaccagcttcgatgatgcgatcaatcgagtacggcaatgggattcggcattcatcaatcgattgcaacaagccgttgcagacgaacccatgcccgaggacgagccgaaaatccccaagatcaaacgactgaagaaagataccgacgccagctggcaagccaagctcgatgaccgtgccgaacatttgcacgcccgctgcacctatcattgcggtgcgctgctggagaccacacgcaaacgcgatattctgctccagctggtggaggcctatgcccaagccaagcgggaacgcaatatggccgaattctccgacttcaccattgccgcgtatcagcttatcgagcgcttcccctccatcggagagcgtacgcgccgcaggtacagccacgtgctgctcgacgaatatcaggacacctccaccacgcaggccgctctgctggcagcactgttccacgtggatgcgtcacagaggtccgccgtcaacgcggtgggtgatccgttccagtcgatttacgcatggcgtggtgccagccctggtgcattccgtatgttccagcaagatttccacctgtctgccggatacaagccattcccgctgtccgtcaccaggcgaaacagccgtatagtgctcgaagccgccaataatctcacgctgccgttgcgctccaatccgtcgcgtccttccagctcattgatgcgtgaggtcgatgtctcatcgctcgaccccatgcctgatgcccccgaaggaacattgggagtactgggcttcgccacggccgggcaggagatcgacgccgtagtgcgtttctgcaagacggccatcgcacggcaccgttccgcagccgaacaacaggaacagatgccgggcgaacagaaagcgccggtcgccgtgctgtttcggtccaaatcacatatgcccgaatatcaggcggcattggaacaggccggattgaccacattcgtggtcggctattccgcgctgttggaacgtccggaaatccgcgatctgatggcgttgctgcacgtggccgccgaccacaccgatacgggatcgctgatgcgcttgctggccacgccacgattcaccatgtccgcagcggatttgaccatgttggcccgttttgctgaagaacagaacacggaacaacgcttccaagcattggtgcaggccggccttgcccaaccggatacaccagcgaatgaatgggcggctgtggtgcgtgagtaccgcgatcaggtggccaatgcggtattcctgccagacgtattgctacgcggcgacctggtaaaactgcttgaacggttgagcgcacacgggcgcaacgccataacccgggccgcggtgatgctccgtcaggtgcatgatgccgtcgggcggccactgggcgacgtgattcgcgccggcatagaagcgttggatcttgacatcgacaccgtattggccggtgtgctgcataatccgcagcaccgcgccaatcccgctttggcgcatatgcctatggatgcgattgtggatttggtggatacgtacacgcaagagattgccgctgagcaaactccctcgttgcatgggttcatcacatgggtggatcatctggcttcggtggaggatgaagccgccagtctccctgacgctccggtggatgtggaactgatgaccgtacaccagtccaaagggttggaatgggatgccgttgcggtagtggggcttaccgccgtcggattccccagcaatcagggcgaccatctcaagatcgtgctggacgagcaccatacgggaggcaccgagcaaggtcactggaccgcacccgaatatcatgagaccgccgactcctggctcaccaaccccaccgccgtacccgtgcctatgcgtgccgatgccggcattctgccgcgattcccccatgatgccgatgtggaagccgaccccatcgcatcgttggcggctttggatgatgtggagcttattgatgatgaagtgttcggctccatgcgcgaattcggcgatggcgtggaagaagtggatgcatccggctggtatttgacgcaggcggaggaatatgggcgccggctgcatgccgacgaacgtcgattgatgtatgtggcgcttacccgtgcgcgagaagatgccctgatgacctattgcgcctatacgggcgaatccgggcgggacccgtcagtggtgcccaaaggctctcgcgccgctcagccatccaatttctggcttgaagtgcatgacgcgctccaagcccgtgaacatgcgatatcggctcaggactgtgtggaacggctgcaagccgccaatgccgggaagcccatgctgatctcggcgcaaggcgaagcgattgccactcccgaagggttctttatcggagagcatgccgcggcatacggtgacgccgtggtgggggaggcatggcagacgccgattacgcagacggatgccgctgtcgaattgccgtggccggctaccctcagcgacgcagtgcatgaacagctgtcacgtggcatcgatgttatcgccgcagattcctcgtcacttgagcagcaccaagacgccggtccactgctgcaacgggcgcaattgctggtggacgacgccgatttgatggccgatgccgccagcggccagtcgcttgatgaggcagtcaaagccaaggcgcaacgcgttctggctgcaggacgccagaacgtgacaagcctgcaagcccgcgtaggtggcatgaacgaacgggaggagcgcctctactggcgtagcattatccgcccgattccgcgcatatcgtctccggcggccgaggccggcacgcagttccatgcgtgggctgagcaattcatcaatgccggtaagccggatgaagcggtactggcatatgaagccgaatcaagtatgccgcatacaggtcaggatgcgggattcgtttcccgggaagccatgttggccgatttggccgaacgggagcggcaatgccgcaagccatccacacggcagcccgctgtcccacagcccacggctcaacaatccgcatccgccgtatccgccgcctccgccacttccataagtagcgacaatgccaccgagtccaagctggtggcgtggcagcgcagactggccgaatcatcgtgggccaagcgcatcccggcgtggacggagcgtgccatcgtcgtggacgtgccgggcgtgggcctggtcaatggcaaactcgatgcggtattcatcggtggacttgacccgtccagcaccaccgcacgctttaccgtggtcgactggaaaaccggtcgtcggcccaccaagccagacgacatcacccgcaaactcgcccagctcgacatgtaccgactgctgctggcagcggtcgaaggtgtggaattggacagtatcgacgccactctctactatgtcagtgagcccgacgagggcttgcgcgagcttcacgcccgcgcgaaaaccaaacaggaaatccttaccgagttgagctccggcattcccgaacaatctgacaacgactgagcccaaaggctcatgacctgtacagcatcggacggccttcaccggcggagagaccttatgcatcgcaaggcatctccgacgatgaagacgactggccacgtaccggtccgcggttgaaacgcgccgcgtgacgttgcttgggaaccgctacccctcggatggcacgtgtgggcgggcgcacgtgccggacaacgcaccagtaaggagttattgtgtccacgactcgcgcggtttcgaagtcgtccgctgcccactcgccctatcagcgcctgttcatgctgcccggagccaaggcgttctgcctgtccggtgcggtggcacgattgccgatctccatgatgagtctcggcatcgttctggcgctcaaccatctctacgacaattggaccatcgccggcaccatgagcgccgcctatgtgctggccatgagctgcgtcaccccgttctacgcccgcgccttcgaccgtttcggccaagcccgcgtgggccggcttgcgctcgccgtgcagatcgtggccatgctcgccttcgccttcgcggcgttggtgcgcgtgccgattccgctgctgttcgctttggccatcatcatgggtctgacgcagttctcattcggcgcattggtccgaacccgttggtcctatgcgttgcgcggtgtggaagatggcgaacagctgctcaacacggcctacgccatggaagccgccattgacgagatcgtctttattctggggccgattctggcggcttggctggccacctccgtgcatccggtatcccaactgttcgtgcccaccgtggcatgcggcatcggcggcaccatattcttctcgctgaaatccacccagccgccggtcatcgtggaacaggtcagcgtggccgcgcacgatgacggcagccccgctgcaagcgaagatgccgaccagctgaccctgcgccaactcaaacgcagcggtgccaagcccaagagtgtattgctctatgccggcgtactgccgttgctcgccgtgttcatcgtgttcaatatgagcttcacgtccttcgacgtgtccattaccgccaccatgaaatccatgggacttgagcccttcctcggtctgcaattggcgatgttcgcggtcggctcgtgcatcggcgcgctggtgttcggctcttgccaactcaaaggctcccattgggcgcatatggtgatgttcctgtcgctgctgaccgtcggctacgtgttcttccggttgtcaatggacaatctcatcctgctgggcgtcttcgaaatcctcgccggcctgaccgtctcgccgacgttcgccaccggcaacctcatcgtcaaggatctggtgccggcggaatccctgaccgaaggactgagctgggtaaccaccgcaggcacggtcggcacgtcgatcggctcgtccgtggccggcattgtgcttgacgcctccaaccctcatgtgggcatgatgctgccattcatcttcacgctggcgtccgtgccattggcgttggccggatgggccttggccaagcggcgtgggtgaaacgggatcgggctacgcccgatggatggttggcggcttcgccggggtctctccctcagtccgcttcgcgtccagctcgaacgcaattaatgatggctttcagccaactgaattattgctcactgtcgttcgccctcacctaaaaacgcctccggcgttttcttcacggttcggctcatcagagggagctcgacttcacggttcggctcgtcagagggagcttgattctgtggacggggtattggcgtgagggcttggcggtgataggctgattgccgattggaaaacgtcccgggtacattgccgggcaggtacgggtagacagggaagaagacatgatcaaggtttcggtggtcggagcaaagggccgcatgggctcgcacgtggtcgaagcggtgaacaacgccgaggatacgcagctggcgctcgcattggatgccggcgacgacctgacccagatcaccaccgacaacaccgatgtggtcgtcgaattcaccgtgccgtccgtcagcctgaacaacgtgctgaccctgatcggccaaggcgtggacgtggtggtcggcaccaccggctggaccgacgagaaactcgcccaggtcaaatccgccatcgccaacggtccgaagcccgaaacccagaaggtcttcatcgcacctaacttcgcgatctccgccgtactggccgactactttgccaccaaggccgcgaaatacttcgaatccgccgaagtcatcgaactgcaccaccccaccaaggtggacgccccctccggcactgccatccacaccgcccacggcatcgccgaagcgcgcaaggccgcaggactcgcccccgtgccggacgccaccgaaaccgatggcggctcacgcggccaggtggtcgacggcatccacgtgcacgccgtgcgtctgcgcggcctcaacgcccacgaggaagtgctcttcggcaacgccggcgagcagctgaccattcgggccgacagcttcgaccgcaccagcttcatgcccggcgtcctgcttgccgtgcgcaagctcgccggcgacgctccggctggcctgaccatcggcctcgaccacttcctcgacctgtaatcgacccgcagtcgaccagtagttgcccccgcatttcaggcagggaagcgcgccgggacgcgcatcacggcattgccaccggctccggccataatgccacgcattcagcaacaatcaaggtacgtagtataagagtccacaatgggaagtacggtaaacactatgagcgagcatgacatgcaccttcttgattcagcacctttcggccgcattctgccggctatggtcaccccgatgaaatccgacggcagcgtcgatttcgccgccgcgcagaagctcgccaaatacctcgtcgccgatggcgcggatggtctggtggtcaatggcaccaccggcgaatcgcccgtcacccatatggatgagaaggtcgagctggtcagggccgtcaaggaggtcgtcgacgttccggtgatttccggcgccggctccaacgacaccgcacacaccgtgcgtatggtcgaacagactcaggaagcgggtgccgacgcggtgctcgtcgtcatgccttactattcccgcccctcgcaggacggtatcgtcggccactacaaggctgtcgacgaatccgccgaaaagccgatcatcgtctacgatgttcccggccgtaccggcttgaaggtcaaggtcggaacctacgaccgactggccgaacttgaacacgtcaaggctgtcaaggacgccaccggcgatcttgcagccgcagtggagaagcagcagcgcaccggcctcgcctggtattccggcgatgacggcctgttcctgccgttcctctccatcggtgccgtcggcatcatttcggtgattgcccacgtcgcctccaaccccatgcagcagcttgtccaggcattcgatcgcggcgatatcactaccgcccgtcgcctcgccaaccagctcgccccccttgtccacgcgttgaatggcgacggctatcaggccgtcatggccaaggctgcgctcaaggtcaagggcgttatcccctccaccaccatgcgtctgccgaacatcggtcccgacgccactcagcttgacaaggctgaagagggcatgcgcgctgccggactgctgtaagcccgaaacgctgcatacgggttgccagcccgccgcccctgcatgacagagcagaggcaccacaacagaaatcccaaaaaggttatggcacaagaacaaaagaaaacaagcaagaacacgaattctcgccgtcgcggttccgcgcgcggccgcaacgccaacggatccaacagccgtacgccgtcccgtaagatcaacgccacccggcaggccaccgcaccccagcaggatgccgtgctgatcgccccgccgaagtaccgcaagggctccatgcgcatcacgccgctcggcggcttgggtgaaatcggccgcaacatgaacgtgatcgaatacaacggtcacctgctgctcatcgactgcggcgtgctcttccccgaggaggagcagccgggcgtggatctcatcctgcccgatttcagctatatcaagaaccgtctcgacaaggtcgacgccctggtgctcacccacggtcacgaggaccacatcggcggcgtgccctacctgctcaagctgcgcccggacatcccgctgatcggctccaagctgaccctcgccttcgtggacgccaagtgcaaggaacaccaccagaaccccaccaaggttgaggttgccggccgtgagaagctcaaggtgggccccttcgacctcgaattcgtcaacgtcacccactccatcccggacgccctggccgtctacgtcaagaccccggccggctccctgatcgacacgggcgatatcaagctcgaccagctgccgctcgaccaccgcatcaccgacctcgtcgaattcggcaagatcggcgaaaagggcgtggacctgctgatgatggactccaccaacgccgaggtgcccggcttcgtcaagcccgagacctccatcggcccggcccttgaccaagcgttcgcccaggccacccgcaagatcatcgtcgccagcttctcctcccacgtgcaccgtgtgcagcaggtggtggacgccgcccacaagtacggccgtaaggtcgtgttcgtcggccgttcgatggtgcgcaacatgtccatcgccgccgacctcggctacctgcacatccccgaaggcaccgtcgtggacctgaagcaggccaacgacattcaggatgacaagctcgtcttcatgtgcaccggctcccagggcgaaccgatggccgcactcggccgcatcgccgacggcaaccaccgcgacatccacatcaacgagttcgacaccgtgatcctcgccagctccctgatcccgggcaacgagcacggcgtctacaaggtgatcaacaagctcgtgcagctcggcgccaaggtcgtcaaccgcgacaacgcggctgtgcatgtgtccggccactgcaacgagggcgagctgctgtacatgtacaacatcgtcaagcccaagtgcgccatgccgatccacggcgagaaccgtcacctggtggccaacggcctgatcgccgtcaagaccggcgtggacccgcagaacgtggtcttggccgaagacggcgatgtggtcgacctgtaccacggcaaggccgcggtcgtcggctccgtgccgtgcggttacgtgtacgtcgatggcgattccgttggcgagctgaccgatgacgagctggaaaagcgccgcattctcggcaccgagggcttcgtctccgcgttcgtggtggtcgacaccgacaaccacgaggtcgtcaccggcccgaagatctacctgaacgccgtggccgaggacgaaagcgagttcgacaaggttcgtcaccagattgtcgaacagctcaacgaccagatggtgcagggcacgcgtgacacctacaagctgcagcagaccatgcgccgcacgctcggcagctgggttgcgcgccagctgcaccgcaagccgatgatcgtgcccgtcgtggccgacatcgcccaggacgtcgaaaccgtagaaaccaagtagtccggattatccagggacgaccgtaaggagtaattgaagtcatgcccggttctaatctcactcgtgttgaagccgaagaacgtaaggccgttatcgaagcgccgattcactatcacgtcgaccttgacctgacggtcggcgcgaagaacttcggttccaagtcgctcatctgcttcaacgcgaagcctggttcatcgacattccttgacatgattgccgatgaggtcaccgccatcgagctcaatggcaagtctttggacccggctacggcgttccaggacaaccgcatcgagttgacggatttgaaggagaagaacgaggtcaccgtcgaggcgctgtgtcgctactccaacaccggcgaaggcttgcaccgttcggtcgacccgtccgatggcaacatctacctgtactcccagttcgaggtgccggatgcccgccgcgtgtacgccgtgttcgaccagcctgatttgaaggccaccttcgatttcaaggtcctggcccctaagagctggattgtcacctccaacatgccggtcgccaccatcgaggacgatccgcgcgaaaccctggacggcacacttggcgataagccgaacgaaagcacccgcctctgggacttcgagccgaccccggtgatgagctcctacttgaccgccatctgcgccggcccgtacgccgaatggcacaccgaatacctgaacgaagacggtcgcaccgtgccgatggcccagtactgccgacagtcgttggccaaggccttcgcgaaggacgtcgactacctgttcgacatcaccaagaagggcttcgcgttctacgccaagacctggggcgtgccctacccgtacgccaagttcgaccagatctacgttcccgaatacaacgcgggcgctatggagaacatcggcatggtcaccatccgcgactcctacgtgttcgagtccaaggtgaccgacgcgctggccgagcgccgcgtggtcaccgtgctgcacgagctggcccacatgtggttcggtgactacgtgaccatgaagtggtggaatgacctgtggctcaacgagtccttcgcggagttcacctccacgctggccaccgccgaagccaccgaatggcatgacgcctgggccaccttctgctccggtgagaagagctgggcgttgcgccaggatcagctgcccaccacgcacccgatcgtcgccccgatcaacgacctcaacgacacctacgtcaacttcgacggcatcacctacgccaagggcgcctccgtgctgaagcagctggcattctacgtgggccgcacgcagttcttcgaaggtatccacaactacctgaaccgccacgcctactccaacgccaccctggccgacctgctgagcgaactggagaagacctccggccgcgatctcaaggcttggagcgccaagtggctggaggaatccggcatcaacacgatcgccgtcggcctgaccataaacgcggacggcaccatcgccgaactgaagctcacccagagtgcgccggccgaacacccggtgctgcgcccgcatcgcctggccgtcggcttttacaacgaagacgccgaaaccggcaagatcgtgcgcaccgagcagttcgaactcgatgtggatggcgaaaccaccatcgtcgaggccgcagcaggcaagccgcgcccggcattcgtgctggtcaacgacgatgacctgacctacaccaagattcgtttcgacgccgaatcccaggcattcgccgaagccaacctgcatcgtttcgacgatgccctggcccgcgccgtgacctggctcgccttctgggatatgacccgtgacggcgaattcccggccgaacgcttcgtggacatgaccctgcgtctgctggccacggaaaccgaatccaccaccttccgttacgcgctggcctgcatgagcaccaccgtccaccactacgtggcgccagcccgccgcgacgatgtgctgcgccacgtggccgccgaactgtggaccctggccaacgccgccgaagccggctcggacacccagttccagctcaccaccgcctacctgggctatggcgaggagggcgacgccgcattcgccgccaacgcacacggtctgctggacggcaccgtgcgtcttgaaggcctcgaaatcgacaacaacttcacgtggaccatcgtccaagcgctcacctccgtcaacgagatgaccaacgacgacgtggacgcgcagctcgccaagaaggagaccacggaaaaccgcgagttcgcctacggcgcccgcgcctccatggccacgacgcaagccaaggaatgggcttgggatcaggcgctccacaacgacgagctgaccaactcccagctcgaagccgtggcccgtggcttctccgccaccccgcgccccgatctggccgagccgttcgccgccaagtacttcgagactgtggactggatctgggccaacaagacctaccacatggccgacgccctgctcaacggcctgtacccgggttacgccgatcccgccacgctggtcaagctcggtgacgcttggctggacgagcacattgccgccgacaatgccctgaagcgtctgatcgtcgaaaacgtggcatcctcccaccgcaccctcaaggttcgcgaatacaacgaagcgctctgatttccttctggctcccctcgggtgcgaggggagctgtcgcctcaggcgactgaggggaatcgcttccgcgaggagctacgtccacattccaacataaaacccgcaaccaatccttaacagcgtattctcgctcaaggccggcaatgtgccggtcgatgagcgacaaggatacggggaatgattgcgggcttttccataacttcattactactgattctgttggccggaatcggcgcaggattcgtgggctatgcggtaggcgcatcgtcactggtctcatacccggccttgctcgcgttcggcattccgcctgtattggcaaacgcttctaacaccgttggcgtggtcggcacgggcatcggtggcgtgatgggcgcgcgcaaagaactcaaaggccaagcggtacgctccattacgtatgtggtcatcggcgcgttcggcggggtggccggtgcgtttctgttgctcaaactcgacccgagtgtctttgaattcgccgcaccagtgctgattttgctgagctcgctgatcatcgccatcaatccgcgcggccgcatgcaggccaagcaggctgccgcggatgccaccgcgcaactcaagcacatcgaagccactgaagccactgaagccactgaagccactgaagccactgaagccgccaagcgcgcaaccacccctaccgcacctcaccgcccgccggaacaactcgtgcagcccatgagtcaggattcctggtgggtatggctgggcgtagcggcggtcgccatctactccggctacttcggcgcgggcgccggtaccttggctctcgccgtgcttgatgccgccaaaatcggcccattccacaagatcaatgcattgaaaaccctgatcggcacaggcgcgaacatcagcgcctcagtggtattcatcatccaaggcgcggtcgattggccggccgccatcatgctgtgcatcggatgcttcatcggcgggtacatcgccccgtccatcacccgcaagattcccgcaaacatcatgcgcgccgccgccgtaatcgccggcatcattcttaccatcgatctggggctcaaaacctattgattcgtgccttacactgatgcagtgaagcatacagcatggccgtcaaccgcagcgtggtcgcagaccccgataaggtggccaatgtctggcatttggcgactgcggaacctgagcgcctagaaaccagcgcggcaggcgaagcggtgaacgacttcctcgatccgccagacacgtcgcagattcacggcattgcgtgtcatgctgattggcggttcgcggcgcgagcaggtgctgttcgccggcgttatgaaggagctactcgcgcccatcaacaatccgcgatatgtcatcatcggtaaggaatggggcgtgcgcgcttactgcgtgagcttcccctgcccgtccgtatttgcccgccgccagcaggacgccgagatactgagccggcagttggaccgctgtctgacgcattgcaccatggtatacgcccgcactgaggaaggtcggcatacgctacttcgctgccaaacgcgttctttcctcaaccgcgacgagcaactgccgcacatactgaccacaacatcggagtaatagatcgttgcattcatggccgagaccaccccggtagaggagatgccgttgggcatgttcatcgcatggctcagcgtgttcctcgccgtcgttctgtttggtgttgctttgccggttatcgatgtacgctgggtagttccgttcgtcgtatttgccgctgtattgtttacaggcgcgtttgccggcccgttcttactagtgcgatggcttcgttcccgtgccggagtgcatcggtccgcccggcatgcccgctaacgaatgtatctcatcattcatccgccgaacaagatgaatatgcgggtttgtgggtgatgccattgcggctgttgaatgctgatttccggttctggagcagattccgtggcggttttttgccgagtcgggtcctagggtggagcacaacgactacgatggtgcgggtaacgcgatacaaggagtggaacttcatatgccgaagatgtttggaaccgatggtgttcgaggactggccaatagggatttgaccgcacgtctggcgttggatttgggcgatgccgccgtgcgtgtgctcggcgacgccggcacccaagacgatcagcctgaggggcgccgccgcgcgctcgtgggtcgtgacacccgtgtgtccggcgattttctggcttccgccctgtctgcgggcatggccgccggcggattcgacgtgatcgacgcaggcatcatcccgaccccgggcatcgcgttcctgaccagcgtgctcaacgttgagatgggtgccgtgatctccgcctcccacaacccgatgcccgacaacggcatcaagttcttcgcgcgcggcgggttcaagctgcccgaccagaaggaggatgagatcgaggccgtgctcggccaggactgggaccgcccgaccggtgccggcgtgggccgcgtgagccacgaccagaccaccgccaccaacctgtacatcgatcatctggtggccaccatcgctccgctgaacgacgacaagacccagcccaagccgctcaagggcctgaagatcgtggccgactgcgccaacggcgccacttccgtggtggctcccgaagccttgcgccgggccggtgcggacgtgatcgtgatcaacgcctcgccggacggctacaacatcaacaagaacgccggttccacccaccccgagcagctgcaggccatggtcaaggccaccgacgccgtgatgggcgtggccttcgacggtgacgccgaccgttgcctcgccgtggacgaagacggcaacatgatcaacggcgaccagatcatgggcattctggcccgcgccaagcagcgcgaaggcaagctcaaccacgacaccctcgtggtcaccgtgatgagcaacctcggtctgaagctcgccctgaaagacatgggcatcaagaccgtggagaccgccgtgggcgaccgctacgtgcttgaggaaatgctcaagggcgattactcgctcggcggcgagcagtccggccacgtgatcaaccgcgaattcgccaccaccggcgacggcaccctgaccgcactgaccctgtgcaacgaggtcgtcaagtccggcaagagcctgaaggagctcgccgccgacttcccgcagctgccgcagaccctcatcaacgtgccgaacgtggacaagaaggccgcctccaccaacaagcgcatccaggatgccgtggcccgtgaggaggaactgctgggagacaccggccgtgtgctgctgcgcccctccggcaccgaaccgctcgtgcgcgtgatggccgaggccgccacccaagcctacgccgacgaagtctgcacccgcctcgccaagatcgtcgccgaagaactcgcgctgtagcacccttccctaaggaaaaaacaatgtttggaaagaacgccaaagtcgacctcgaactcaaccgtgatgtcgaacaactcatcaaaaccggcggcaaggagaagctcctgcccatcgtgcaggccggcgaaccggtgttgcgccaacggacagtggcctataatggccagctttccaagcgtacgctcgccaaactcatcgatacgatgcacaccaccatgctggaggcacccggcgtggggctcgccgccacccagatcggcttggggctcgcgctcgccgtggtcgaagaccacgtgcgcgacgacgaggatgatccgcgcgaaatcgcggaattccccttccacgtgatcatcaacccgagctacaaacccaccagcgacaaaaccgcctcgttctacgagggctgcctgagcttcgacggataccaagctgtgcgcaagcgttggctcgacatcaccgccgaatgggatgatgaagacggcaaacaccacagcgagccgctgcacggctggcccgcacgcatcttccagcacgaaaccgatcatttgagcggcgagttgtatatcgatcgcgccgaaatccgttcgctgaccaccaacgagaacctcgaggactactggtgcgaagacccggtgcccaccgaggccgctgaagagctcggtttcgcactatgaccgaccgtgcatggttcgacgccgccaagggagacattccccaatgggcggcgtccatgcccaaggacgccgatggcaccaccatcgactgggactgggtgcgttctctggacctggcgcatggcgtcggcacaataccggaatccaccccacagtccatccacgacgcattgaaggccgactacgccacacgcgagcgtctggaatcgatcatcgcccaatgcaacagcgcattcatgaccgatttcgaccggttcatcggctcctatcgtctgcctcgcgcgctcgcctacgccaatcgtcggctcaacgacaacatcaacacgctgttgcatctgggcgaacagcaacacctatgggcggtcagtcgcgaacggcgggggagggccaccattgccgtgctcaagccgtactccggcagcggcccgtcgaacgatgaccaaggcatgctggatctgagcggcgaagccggtggcacatctgccggaaacactgccgccgaaaacagcgatgtcaagttccccacaacagtcgccttggacgatgtccaagatcgtacggcagcgattcttgacgcacgcgccgaacggcgtaaggcccagcgcttccagaagcgggcgggcgatgcggcgatggcccgcgccaatctctccggcgcgacttcgccgggtggtgccgctctgccgggtggtgccgccgcgtctggcaacgctaccggacaccatcccaagcccgactggcgcgacgcctacctgcccggccgcgacgtggatgcggtgatgggcatcgacatcgaaaccaccggcatcgatccggcacgtgactacatcatcgacgtcggcttcgagttcatgaacatggccagtccgcgcccggccggcgaacccgagacatacgcctatgagcagggctattacgccgccggcgacgcctacggccagtcccgcctcgcttttggcgtgccgccggaaaacgcggcgctcggcaacgccctcatcgccaaactcaccggcatcgatgtacgcggccgcagcagcgaggccgggtaccgactcttcgacgaatggccccaagcccaggccggcctgctcgcgcggcttacccagcagccgtacgtggcgcataacgccaccttcgaacatagctggttcatgctgaacgtcgccggatacgcggaaagctaccgcgccgggcgcatcaccatcatcgataccctgccgatgagccggcagtgggaccccggcgcggtacccaccaacgagcatccttacggagacaacacgctcgacgcctacgccaaacgtcagggcgcgcttgattccgcccacaacgaacgccacctgggccttgaggattcgcacatcatgctggtggccatgaaacaccatctggcggcgctgaaagcgcaagggaaagggccgtgggggtccaccggcagggcgggcgtcggcggcaagtcctgcggtcgtaagcggtgagtacactattggtctcgtgagtaactatcaggacagccgacagcagcgtgagaaccgccgccgcaccatcgtgcgtgtggtgtgcgtcgtcatagctgtggccatgctcggctccctggtcatcccggcgatttacgcggggctttgacgttgccttcgcatattcgtgcccgcagttgaacacgtctgatgcgagggattcgtgaggtcgcccggccggttatcggcaaggcaggcccggaaccttctgacagcatggattgcaggcggatgcgcgtgtggcgcggcaatgcccgccaacgccagaggaatgtgcgaaggctgtcaacaaggacgtgacttcccaaggaatctcaaagaatcaacagtaaggtaaaccacgatggcagaatttgactttacccaggcgatcggcgaagcccgcgccaaatacgaatccatcgccaaggcgctggacgtcgaccgactcaaggccgatatcaaggatctcgaaacgcaggccgcggccccgggcctgtgggatgacccggaaaacgcccagaagatcaccagccggctgtccgccgcggaatcgcagctgaagcgtctgaactccgcctcccagcgcatcgacgatgtggaaacgctcgtcgaactcggccacgaggagggcgatcaggactctctggacgaggcgcaaagcgaaatcggcgagattcagaaggatctcgaccagatggagattcagaccctgcttgacggcgaatatgacgaacgttccgccgtggtgaccatccgctccggtgccggcggcgtcgacgcggccgacttcgcgcagatgctgctgcgcatgtacctgcgctactgcgagcgtaacggcttcaaggccaaggtcatggacacctcctacgccgaagaggcgggcatcaagtccgccaccttccaggtggacgccccctacgcttacggccgactgtccgtggaaggcggcacccaccgtctggtgcgcatctccccgttcgacaaccagggtcgccgccagaccagcttcgccgccgtggaagtggtgccgctggtcgaggccaccgatcacatcgacattccggatacggacatccgcgtggacacctactgctcctccggccccggcggccagggcgtgaacaccacgtactcggccgtgcgcatcacccaccttcccaccggcatcgtggtgaccatgcaggatgagcgttcgcagattcagaaccgcgcctccgccatggccgtgctccagtcccgactgctcgtgctgcgccacgaggaggaggccaagaagaagaaggagctcgccggcgatatcaaggccagctggggcgatcagatgcgctcctacgtgctgcacccctaccagatggtcaaggatttgcgcaccggctacgaaaccagccagacccaggccgtgttcgacggcgacatcaacgcgttcatcgaggccggcatccgctggcgccacgaacagcgccgcgccgccgaaaccgaggagtaagcagcattatggcgctgatctcactggacaatgtgtccaagatctatcccaaaggcacccgaccggcgcttgacgacatcaacctcgatatcgaacgcggtgatttcgtgttccttgtgggtgcgtccggctccggcaagaccacgctcttgagcctgctgttgcgcgaggaggaggccaccagcggcgagattcgcgtggccggcaacgatctgcggcgcatcaccaaccgtcaagtgccgcagtaccgccgttcgctgggcttcgtgttccaggattacaagctgctcaataacaaaaccgtatgggagaacgtggcgttcgcccttgaggtgatcggcacgcggcggtccaccatcaaatcgttggtgcccaaggtgctgaataccgtgggactcaccggcaaggaaaagaactatccgcatgagctctccggtggcgagcagcagcgtgtggccatcgcccgcgcctacgtgaatcacccgcagattctgctggccgacgagcccaccggcaacctcgacccgaccacttcgctgggcatcatggaagtgctggacgccatcaaccgcaccggcaccaccatcgtcatggccacgcataacgaagagatcgtcaactcgatgcgcaagcgcgtggtcgaactgcacaacggcaagatcgtgcgtgacgaggctcatggctcctacgattccgccctgttcttcccggatgccgaagtcgaagccaagtccgacaccgcccatcatgtgctggcggcggcgaccaaggccatcgagggcagtgacgagccgtctgaaggcatcgcccgtttggccaattccgtgcattccggccgcaccggccgctatggcgagacgtttgcgccgctggaagacacgctgacctggggcaagggcattccgttggatgagcaggccgccgccctggaaagcacccaggcgttcgacccgttcaaggacgagtccggcgagaccgccgcggttgccgtggttgccgatacgtccgtgtcatccgccgccgagccgccggccccgccggaactgccggccccgccggaactcccccccgccggaactgcccgcaccgccggaaccgccggaaccgcccgaaccgccggccaacgagcagtccgccggcgagcagtccgccgcagaccaaacatccgacgatcaacccgctgagggcgcgaaggagtaagggggatcatatgcgagcacgattcattctgtccgaaacgtgggccaacctcacccgtaacctgtcgatgctgctgtcgctgacgctggtcaccttcatctcattcctgttcatcggcgcttcggtgcttactcaggcgcagatcaccaaagccaagggcgactggtacgacaaggtcgaggtcgtggtgtggctatgccccgacggcaccagccaatccgcgaactgcgcttccggcaaatcgccctcagccaatgagatcacggcactgcagaaaaccattcgcgacgaactcaacgacgtggtctccaacattgactacgtcagcaagcaggacttctacgacagcacattcaccaagcagtacccgaatggcgaattccaaggccgtacgctgaccgcggacgatatgcaggactctctctggctcaagctgaaggatccgaccaaatatcaggtggtctccgaagtgctctccggcaaggagggcgtggaagacgtcaccgaccagcgccagatcttcgacccggtgttcgccgtgctcaaccgagccacggcggttacggctgtgctcgccggcgtgatggtggtggtcgccatcctgctgaccggaaccaccattcgtatgtccgccgcatccagacgaaccgaaaccgaaatcatgaggtacgtgggtgcctcgaactggacgattcgtctgccgttcattctggagggcaccatcgcctcgctgatcggctcggtgctctcgtgcctgatgctttcggctatcgtcaacgtgttcgtcaccggctggctggcgaaatccgttacatggattccttatgtgaatcagctcacggtactggtgatatcgccgttcctggttgtgggcgcgatactgctgtccatcatcgcttcaaccatctcgttgcggcgttatttgagggcgtaacgcgaccggcttacccgcgagaaatgtgatgacatcgtgtgcaagcctctcaggttcgcatgttatggtattggcttaagtgagcgaaaggactattcacatatgacgaacgtacgtgtgatcaagcccgcactggcggcactggtggccgccgcagcctgtgtgggaggtctggcgttcagctcggcacagcctgcccaggcagacacctattccgacctgatcaatgcgcagaaccagcacgccgcgtcggtacagcgcgaggccgaactcaagcagcagctggccggtgccagccaggacctggcgaataaggtacttgagctggacgatctgaccaacaacaagattgtcgccgcgcaggccaaggtcacacaggccaacgaggatgccgccaccgctcaggacgaggccgatgccgcatccggacgtctttccgccgcgcagaaagacaaggagacgctcgaggagcagatcaagcagaccggcaaggactacgatgacgcgcacgccgccgtggcccagctggcccgtgacgagatgcacggctcgaatgcttccgacgtgatgagcgtggtgacgggtgccaccagcacacaggacttcgtcaactccatgcagtcccgggacgcgttgtcccgcaacgaggcgaatgcggcttcctccgccgcgacctcactgagcacgtcgaagaaccgtggcgagcgcttggcggccatcgaaaagcagatcgctgtgctcaagacccaggccgatgagaaggccgcttccgcacagaccgccgccgaaaccgcgcaaagcgaacgtgacgctttggacaagctgcgccaggaaggcgaagcaaggcgtgacgaactgtcttccatgatcgacagtctggattcccaatccgccaagcaggcggcccggaccgtactgatcgcttcccaggtcgattcctacaatcgtcagttccagaaggagcagcaggacgccgccaaccgggtggataccggtaaccagggcggcacgccgtccactccggtgacccccgctccggcgcccgctccggctccggctccggctccggcgccggcccccgcccccgcccccagcgtcggcggccaaggcacgtcgaacggtgattacggcaacgcctataccgccggccagtgcacgtattgggcgtatgaacgccgtaggcagatgggcattggcacgccgtcctatctcggcaatggcggcgactggtggcgcagcgccccctcgtacggcttgcgcgtggaccacaaccctcaggtcggcgccgcactctccttcctgcctggtcaggacggtgccgacggtacctggggccatgttgccgtggttgaagccgtgtatggcgacggcacattccagatctccgaaatgaactggggtggtccgtggaacatgcactaccgcacgctgaccaatttgggtcagtactggttcgtccactgaccggttggttcggccgatatatgcggttgaagggttcctcttgaagaggaaccctttttcgtattcgaggccggtccgtgatatcgtcggatgttgcgttgctacccacgagttgctactcacgagttgttgcccacgaaaggaggagacatgcccaaggaaaccggtgagaaactcatcgtccagaacaagaaggcccggcatgactatgccatcgaagacaagtacgaggcagggctggccctgaccggcaccgaggtcaagtcgttgcgcgaaggccgcgcatcgctgtccgaggcgttcatctccatcgaccgccgcggcgaaatgtggctggagggcgcgaacatccccgaatacctgaacggcacatggaacaaccatgcgcccaagcgcaagcgcaagttgctgctgcaccgactgcagatcaccaagctcgcccgcggcatcgaggccaagggatacacgattgtgccgctgagcctgtacttcaaggacggtcgcgtcaaggcggagatcgcgctggcccgaggcaagaaggaattcgacaagcgccaggccctgcgcgaagagcaggacaagcgcgaagccctacgcgccatgcgctacgccaacatgcgccactagtcccgccccttggctcccctccggaggggagccaagggtaggatgtccgcgttgtgggccatttcgcccacgattaacgcttccgtagcattgcactcctacgctctggaaccatctgggaaacatacccgcccagctgactatccggagagaggaaatccaatgtctctaagcaagggaatacaatccgctgcggccgccgccctgagcgcggccatgctgatcgccgtggcggcctgtggcacgactgacggcaccgacaccgcatccaagagcggcgattcatccaaggactcgtccagcacttcgattcaaggcttcgacaccagcagcatccagaaggacgacgagatcgccgcactgctgcccgattccgtggccggcgacggcacgctgaccgtcggcgccgatacttcctatgccccggccgagttcctggccgaggacggcaagaccccggtcggctttgatgtcgacctgtccaaggcgctggccgcagtgttcggactgaaggaaaacaccgtctcctccacgttcgattcgattatcccgtccgtcggctccaagtacgacatcggcatctcctccttcaccgtgaccaaggaacgcatggaggctgtggacttcgtgacctacttcaaggccggttccacgttcgtggtgcagaagggcaacccgaacaaggtcgactcctcgaacctgtgcggcgtgaaggtggctgtgcagaccggtaccacccaggaagaggaagtcaacaaggataacgagcagtgcaaggcggacggcaaggatgccatcgacatccagtcctccaagctgcagaccgatgtgactaccgccgtggcttccggcaaggcctccatcttctacgccgattccacggtgtccgcctacgccatcaagcagaccggcgacaccttggagacgctcggtgaagacgccggcggggtgcccgaggccgtggccatcaagaagggcgataccaagaccgccgaagccgtgcagaaggccatccagaagctgatggacgacggcacctacaagaagatcctcgacacttggggtgttggttccggtgccatcgacaaggctgagatcaacccggccgacgccgcctgattgccaggtgtccctgttcgttcccgctggcgggagctgtcgccgaaggcgactgagggtggtctgtagcataacagccaccagcagttgtattcttatgcggcggcctcccagcgggagcatttgtatatgtatacgctataatgtatatttatacctgattgttgatagtcgctatagggcggctccacagagaagaagagagagatcatgcagttcaacaagctgaagaccattgcggccgccgccttgagcgtggccatgctgttctccgccgcggcttgcggcacctccgacaaggcgggtgactccggttccgataagggcggttcctccaagtcggtcaccatcaccagctacgacgtgagctccgtgaagaaggacgatgcaatcgccgcactgctgcctgaatccgtgaccaaggacggcaagctcaccatcggcaccaacccctcctacgccccggccgaattcctcgacgccgacggcaagacccagatcggctacgacatggatcttgcccgcgccatgggcaacatcttcggtctcgataccgaaatcgtctcctccaacttcgatacgatcattccggccatcggctccaagtacgatctgggcatcgccgccttcaccatcaccaaggagcgcatggaatccgtcgacttcgtctcctacttcaccgcaggcatgggctatgcagtggccgcaggcaaccccaagaacgtcgatgagaacgacctgtgcggtctgaacgttgccgtcgagaccggcaccgtcgaggaagaggccatcaacaagaccgccaagcagtgcaaggcggacggcaagaaagacatcaccatccagtcctccaagcagcagaccgacgccaccaccgctgtggtgaccggcaaggccgacgtcttcttcgccgattccccggttgtcggctacgccattgcccagaccgatggtcagctggaacagctcggcaaggacttcgatgaagtgccgaacgccatcgccatcaaaaagggcgattcccagaccaccgaagccgtgcagaaggccatgcaaaagcttatggacgacggcacctacaccaagatcctccagcactggggcgtcgaatccggcgcactggacaaggccgaaatcaacccggccgtcgaatagccgacaagctgtcgcgaaaattcgaatggggcgcactgtttgtaacacagtcgccccattcgtacactaaggttcaacgctagttgcaacttgcagttcaggctgcccaacacgtccaaggaaccaaattatggcgaagaaagaagtcgacggtgagggagtgaacatccccaaccgcatcaaggcgctgccggtcaagcgccccggcccgattgtggccgcagtgatcgtggtgctgctcgccgcgatgctcattcaaggcttgattaccaatccgcgactggattggcccaccgtctggaagtacctgttcaacgagaacgtgcttgaaggcattcgctataccttggagctcaccgtgatctccatggtcgtggcgatcatcctgtcggtgattctcgccatcatgcgcaaatccatcaatccggtgctgcgcggcgtcagctggttcttcatctggttcttccgcggcacgcctgtgtacacgcagctcattttctggggtctgttcgccgtgctgattcccaagatcagcctcggcattccgttcacctcggtggagttctggagcatcgactccaacgtggtggtcaccgcattcaacgccgcatggattggtttggctctgaacgaggccgcctacctgtccgaaatcgtgcgtgccggccttgaagccgtggaccccggccagaccgaggcggccaaggcattgggcatgaaccgcacgctcatcatgcgccgcatcgtgctgccgcaggctatgcgcatcatcatcccgcccaccggcaacgagaccatcggcatgctgaagaccacctcgctggtcaccgccgtgccgttcaccctcgaactgcagttcgccaccaacgccatcgccaaccgtatctacaagccgattccgctgcttctcgtggcctgcttctggtacctgctgatcacctccattctgatggttgtgcagtcccgccttgaggcgcacttcggcaagggcttcaacgcccgcccggtgggcaccaagggcaagcagccgccatacgatccgccgtaccccggcaagtctgacggcgagccgaaggacgatgtgaacaaaatcaatcagaccaccttcgctgggctgaatgcgtaaggcgggagcgagaattatgactacgaacgacatcaccaactccgctccggtcgtgcgcaaggcggttgacggttccgtgattcctgctgtcaaggccgtgcaggtgcacaaggcgtttgggccgctgcatgtgctcaagggcatcgatctaaccgttatgcccggcactgtgaccgtgattctggggccctccggttccggcaagtccacgttcctgcgtctgatcaaccagctggaaaccctgaccggcggttccatcgaggtggacggcgaactcatcggctacaagcacgtgaccaaaaacggccaggacatgctgcagaccctggacgataaggagatcgccgcacagcgttctcgcctcggcatggtgttccagcgcttcaacctgttcccgcacatgaccgcgctggaaaacgtgatggaagccccgattcacgtgcagcaccagtccaagaaagccgcccgtgacctggccgtggccgagcttcagcgcgtcggtctgggcgatcgcatggactattacccctcccagctgtcaggtggtcagcagcagcgtgtggccattgcccgtgctctggccatgaagccggagatcatgcttttcgatgagccgacctccgcccttgaccccgaactggtgggtgaagtgctcaacgtcatgcgttccttggccaaggaaggcatgaccatggtgtgcgtgacccacgaaatcggcttcgcccgcgaagtcgccgaccagatcgtgttcatggacggcggcgtagtcgtagaaaagggcggccccgacatcatcgaccaccccaccgagcctaggtttaaggacttcctacagcacgtgctgtaggaaggctgttatattacctcagcactgtcgtgcttcggcgtcgcctacggggagcccactgggctccctgctttacggctccgcctacagcacgtgctgtaggaaggctgttatattacctcagcactgtcgtgcttcggcgtcgcctacggggagcccactgggctccctgctttacggctccgcctacagcacgtgctgtaggaaggctcgttgttgcagctccaaaagcgtacgctgatgaactcagcgtacgcttttcacgaaggggcatgttccaatcctgcaaaggcggcgggttggattcgctttgcgcaataatcgtccgctaggctggtgagccatgtgtggaatcgttggatacgcgggaaatattgaaacggcatgcggcaagcctttggaggtctgcctgcaaggcctggaacgtctggaataccgaggctatgactcggccggtgtggcgctgaccgcgcccggcatggataaggtggtcgtgcgcaagaaggccggccgtttgaagaacctggtcgaagacatcgagcgcaagccgatgccgctcgccacggtgggcatcggccacacgcgctgggccaccaatggcgagccgagcgacgtgaatgcccacccgcacaccagcatggacggcaaggtggccatcatccataacggcatcatcgaaaacgcctctcagctgcgtttcgacctgcaagccgaaggctaccgattcgcctccgccaccgacactgaggtggccgctaagctgctcggcaagatcgtggacaagattatcgcggacgaaggcaagccagacttgttcaaggctgtgcgccgtatggcccgcatgcttgaaggcgcgttcaccattctggccaccgactgccgccagccggacatcgtggtcggagcccgccatgattcgccactggtcgtgggccttggcgagggggagaacttcctcggttccgacgtcgccgcattcgtggcctacaccaagcgcgccatggaagtcgaccaggatcaggccgtatgcgtgtccgccgacaaggtcatcgtcgccgatttcaacggcaacgtggtcgaaaacccgaagacctacaccgtggattgggatgcttcggccgccgaaaagggcggctgggattcctttatggacaaggagattcacgaagaccctgccgcagtgcagcgcaccctgcttggccgcttcgacacgaatggcgacatcacccttgatgaagtgcgtatcgacgaacacgacttcaaggccatcgacaaaatcatcgtcgtggcctgtggcaccgccagctacgccggccaggtagccaaatacgccatcgaacactgggtgcgtatccccgtggaaatcgaactcgcgcacgaattccgttaccgtgacccgattctgaccccgcgtacgctcgtggtggccatttctcagtccggcgaaaccatggatacgctgatggccctgcgccacgcgcgcgaacaggggtccaaggtgctggccatctgcaacacgcagggtgcctccattccgcgcgaatccgacgccgtgctctacacacacgccggcccggaagttgccgtggcatccaccaaggcgttcgtggcgcagattaccgccgcctacctgctgggcctgtatctggcgcaggtcaagggcgcgatgttccgcgatgagattcatcagatgctcgactccctgaaagacatgccgcgcaagattcagtgggtgctcgacacccagcccaagaccatccaggcggccgccgagcgcatggtgaacgccaactccttcttgttcctcggccgccacgtgggctacccggtggcgcttgagggcgcgttgaagctcaaggaaatcgcctacacgttcaccgagggcttcgcggccggcgagctcaagcatggaccgatcgcgctggtggacgagggtgagcccgtggtgttcatcgtgccgccgcagcgcggccgcaatgtgttgcacgccaaggtgatctctggtatcgaggaggtcaaggctcgtggcgcgtacatcatcgccgtggccgagcagggcgacccggatgtggaacggtacgctgacgtggtgttctggcgccccgcctgcccaacgctgatgagcccgctggttgacgtggtgccgctgcagctgttcgccatggacatggcaaagctcaagggctacgacgtggacaagccccgcaacctcgccaagtccgtgaccgttgagtaagccacatcggtatgtgattgacgagcctcatattccgtttgagatggacgtgctgtatgaggacgagcggatcatcgtggtggacaagccgcattttctggccaccatgccacgcggcatgtggtatcggcagaccgcgctgatccgattgcgtgagcggctgggggagccggacatcacgccagcgcatcgattggaccgcatgaccgccggcgtattggtgttcgtgcgggatccggcctgccgcggcgcgtatcagatgctgttccagaaccggcaggccgtcaaggtctatgaatgcctggcgccctgccggccgatcagccgcccgcgattcggcacgatcatgaaggtcgagccgccatgcccgttcccattgctgcgccgatcgcacatcaccaaggaacatggcacgatggccgcattcgaggaaccgggtttggccaacgccgaaaccctcatcgagcgcggcgacctctgtttccctcccgctgacgggaggtggcgcgaagcgccggagggtggtccccatctggggaatcaccccatctgccgctacacactccacccgcgcaccggcaaaacccaccaattgcgtgtccacatgaattcgctcggcctgcccatcgtgggcgacgacttctacccgcgcatccagacgcgcccctacgacgatttcagccaaccattgcagttggtagcacgcatgctgcgattcaccgatccaataacaggcgagaagcgcgaattcgtttcccgtgtgccgcttaagatctgatttcttatgcattgagagtgttttcgctcatggtgtcaccattcatagagttcggcgggctgcggggttttgcggacatccagcgacaagccaagctcagtcagagcgctgagaatggtggagaatccgggattggggactcgggcgtgttcaaattcgatcagccagcgacgtgacacgcccagccgttgggccatgtcggtctgactgatgccctggcgttgcctttcatccttgataagccgcgcgtattcggcgatatccatgacaatcatgtgcaaaatatatcacagtatagtaaagtgtgcaatattctgcacatagttggaaatgtgcagaatattgcacaaccgagtcgattggtcggtgcggaattgcctatggatcactggcaggtgaatcactgacaggtaccagtggatgccagcgcatgccgctcgtcagctgatgtcgagcacggaaccgcgttcaatcagttccggcgggattacggttttgacgccgaccggtatcttctcgccttcgcattgacggcggaccatggagaaggcggtggcgccaatgtcgtcaaagcgcagcttcatggtcgtcaggttcaagcgcggaaccatatctaccagcgaatcatcgacgcccacgatgctgacatcctcgggcacgcgcttgcccgctgactgcaacccgagcattgcgccgtatgccatttggtcgttggcggcgtagatggccgtgcagtcggggtcgtgggccaacgccacgccggcctggtagcctgaatccgcgcaccaatcgccgatgtacatgctcggtacgcgtgctcccatttgttccaacgcttctcgccaaccgcgggcgcggctttcggcggcgcgcgaggtggacggtccggcaatgtggtagacggtcttgtgccccttgctcatcaggtaatcgacgatagcggtcgagcagccatactggtcggcgtcaacggtggggcagtggtcggcggcggattcgcagatgagcacgactggaaattctcgcggaggcttgtatccgacgaaatcggagatgcgttcctccagcactacgatgacaccatccaccggctgacgctgcatgcgatcgatggcggcggaaagcgtgcgttccgcaccgtggcgcatggtctggatggtgactgaataatcgtcatcggccgcgttggccacaatagaatcaaggatgcgggcgttgccgaacgtggcggtgttgaacatcaccacgccgatatcctggaagcggccgtgctttagggctcgggccgcataattcggacgatacccaaggcgttccattgcagcttcgacacgctggcgtgtttcgggtttcaccgcatcgctgccattcgccacgcgggacactgtctgtggcgaaacgccggcggctttcgctatgtcttgcatggacacctgtgttggcctcgacatttcaccctcgcttgactcattaatgtcggtgtttcgtttgcaacgcttatcttagggccgcttacggtaacgataacatcgttgtcttcgtgaccattgtagcagagtgactgagaaacccttaattcaacacggtactcaacacgattggacaatgttacaaatggtgttatgatgataacgcaaacattttggtcaaccttcgaaggagaggggttgggaatggcttcagccgatatcgcagctgcgcccgtgcattcgggcaaggctcgtgtgaataagcacaaggccgattggcgtggatggaaattcatgtggccttttgcggtggtgttcgtgttcgtgttcatcgtgccgattgtgtacgccgtttatatttcgttcttcaagaagcagatgatcggcggcaccaagttcgtcggcttcgagaactacgcgcgcctgttgggtgatggccagttctggagcagtgttggtcgtgtggccctgttcacgtgcgtgcaggtgccgatcatgctgtgcctgtcggctttgatggccctggcgttggattcgatgaagctgcatggcacgaggttcttccgtatctcgacgttcctgccgtacgcggtgccggcggtggtgtcgacgttgatctggggtttcgtgtatggcgcgaagtacggcctggtgggttcgttgaacgatttcctgggcacggacatcgacgtgctcgcccccagcgtgttgttggccagtatcgggaacatcgtgacgtgggagttcacgggctacaacatgctcatcttctacagctcgctgtcgaccatcccgcattccctgtacgaggcggccagcatcgacggcgcgtcggagtggcagatcgtgaagagcatcaagcttcccgaattgcgcggcagcctggctatcacggtgatcttcagcatcatcggctcgttccagttgttcaacgagccgagcattttgcagaacatggttcctggtaatgcgatcacgacgtattacacgccgaacatgtacgcgtacaacctgagcttcagcggcaaccagtcgaattatgcggccgcgttggcgatcgtgatggccgtgatcaccatggccatcgcctacatcgtccagctcaacagcctcaaggagcagatgaagtgacgacgactactgctgttcgtgttgaggaatcgatgatgatcgtgaaggagcgtatgtgatgagtgcagcaacgacttcggccgccggtcgcctgaccgacggcgagctcaaggcccgggagaaggccgccaggaaggcggagaaggcccgccagaagaggatcgccgccgacgaggccgccgaacgcaggcgcagcgcgaaggcggggttcgcgaacgtgaacaacccgaggcgttccacgttgttgaccgtcctgtgcgcggtcttcgccgtgtactgcctgttcccgttcgtctaccttttgatcaacgcgacgaagacgcaggccgacttcaccagtacgttcggcctgggcttcggcaagacgttcgccctgttcgacaacatcgcgacggtgttctcctatcaggacggtatcttcgggcgctggctgctcaacacgctcctgtacgtggtggtcggcgccggcggcgcgacactgctggccatcatgggcggctacgctctggccaagttccgcttcccggggcgcaaagcggtgttcgcggtcatcatcggcgcgatcagcgtgccgggcatcgctttggcggttccccagttcctcctgttcgccaaattgggcctgacgaacaccccgtgggccatgatcatcccgtcgctgatcagcccgttcggtttgtacctgatgtggatcttcagcgagcaggccgtgccccaggagctgctggaggcggcgcgcgtggacggcgcgtccgagttccgcacgttctggcagatttccttgcccctgttggctccgggcatcgttacgacggccctgttcacgatcgtggcgacgtggaacaactacttcctgccgttgatcatgctcaaggacgcggactggtacccgctgaccatcggcctgaaccagtggaaggaccaggcctcgaccgcgggcggccaggcgatccagaacctggtgatcacgggctccctgatcacgatcatccccctggtgatcgcgttcctgtgcctgcagaagtactggcagtccggactcgccgcaggcgccgtcaaggagtgatggagtcggctccgccgacgcggtgtcttcaccgcctcgcggcggggtctctccctccgtcccggctccgccgagacaaccttcctcatcagagggaggtaatagtgccaagcccctctctgacgagctgagccgttaggcaaacagccctgtgggctgtttattcccgcggacgcagattatcgataaaattcaataaaggaactgaatcatcatggaacgtaaagagttcaagtggccgcagcctcttgcgggcaacgagccccgcatctggtacggcggcgactacaaccccgaccagtggccggaggaagtctgggacgaagacatcgagcttatgcagcaggccggcgtcaacctcgtctccgtagccatcttctcctgggccaagcttgagcccgaagaaggcgtgtacgacttcgattggctcgatcgcgtcatcgacaagctcggcaaggccggcatcgccgtcgatctcgcctccggcaccgcatccccgccgatgtggatgacccaggcccacccggagatcctctgggtcgactaccgcggcgacgtctgccagcccggtgcccgccagcactggcgcgccaccagcccggtcttccttgactacgcgctcaacctgtgccgcaagatggccgagcactacaaggacaacccctatgtggtctcttggcatgtgagcaacgagtacggctgccacaaccgcttcgactattccgaagacgccgagcgcgccttccagaagtggtgcgagaagaagtacggcaccatcgacgctgtcaacgacgcctggggcaccgccttctgggcgcagcgcatgaacaatttctccgagatcatcccgccgcgcttcatcggcgatggcaacttcatgaatccgggcaaactgcttgactggaagcgcttcagctccgacgccctgctcgacttttacaaggccgagcgcgatgccctgctcgagatcgcccccaagccgcagaccaccaacttcatggtctccgccggcggtaccggcatcgattacgacaagtggggttacgacgtggacttcgtgtccaacgatcactacttcacgcctggcgaagcccacttcgacgagctggcttactcggcctccctgtgcgacggcatcgcccgcaagaatccgtggttcctcatggagcactccagctccgccgtcaattggcgcccaatcaactatcgcgtcgaacccggcgaattggtgcgcgactccctggcccacttggccatgggctccgacgccatctgctacttccagtggcgccagtccaaggccggtgccgagaagtggcactcttcgatggttcctcacgcgggccccgactcccagatcttccgcgatgtgtgcgagctgggtgccgacctcaacaagcttgctgacgagggcctgctgagcaccaagctggtcaagtccaaggtcgccgtcgtcttcgattacgagtcccagtgggctacggaacacaccgccacgcctactcaggaggtacgccattggaccgagccgctcgcgtggttccgcgcgctggcggacaacggtctgaccgcagacgtggtgccggttcgcggtccttgggacgagtacgaagccgtcgtgctgccgagcctgaccatcctgtccgaagagaccacgcgccgcgtgcgcgagtatgtggcgaacggcggcaagctgttcgtgacctactacaccggtctggtggacgacaaggatcacgtctggctgggtggctaccccggttccatccgtgacgtggtgggtgtgcgcgttgaggaattcgccccgatgggcaacgacttccccggtgccatggaccaccttgacttggacaacggaaccgtggcgcacgatttcgccgacgtgatcacctccgtggccgataccgctcacgtggtcgcctccttcaaggcagataagtggaccggtttcgacggcgctcccgccatcaccgtcaacgacttcggcgacggcaaggccgcatacgtcggtgcccgtctcggccgtgagggtttggccaagagcctgcccgtgctgctggaggaactcggcatcgagacttcggctgaggacgatcgcggtgaagtgctgcgcgtcgagcgtgcggacgaaactggcgagaaccacttcgtgttcctgttcaaccgcacccacgatgttgcggtcgtggacgtggaaggcgaaccgctggtcgcctcgctggcccaggtcaacgagtccgagcacacggccgccatccagcccaacggcgtactcgtcgtcaagctgtaaaaccgcgcatagcgcctaattacccaacggctcccttgctgctcatcgcagcaggggagtcgttttcgtatctccagcaaagtcgggtagggtggtcaccgtgcgaggcaaaaacagagtgacgatggcggacgtggcccatgaggccggtgtttcggtagcctcggtgtctaattttctgaacaaacagccatatatgagcgaggcgatggccgcgcgtattgcggaagccatcgacaggctcggatacaaagtcaactcgtcggccagaaacctgcgttccgggcgtacccggttgctcaagctggtcattcccgatctgcggcaggtgtatttctccgaactcgccgaggatattctggccgaggcccggcaacatggctacggcgtcatcgtggaatccaccaccaacaatcgtgcccgcgagctggaaagcatcgcatcgatgggcacgcacagcgcggacgggctcatcttaagccctctgatgatgacggttgacgatatcgcggctttggatggcgattacccgctcgtactgttgggtgaacgtttgttcggcgtcaacgcgccgcacgtagtgattcgcaatcgcgaaggggccgccgccgcgacttatcacctgcttgatgccggttgccgccgcatcgccgtagtcggtgccgtgccccaccccgagcacgatttctcgtcgggctccatccgcacccacggatatcgtgaggcgctggccgcgcgcggcatcccctgtgatgacagtctgcttatcgaaacccaaggctgggggagcgccgacggtttggtcgcggtggacaccatgctggagagtggcctgcaattcgatgccgtgttcgctttgaatgacttgctggcgtggggcgtgctgcgtgaactgcgcgaacgcggcgttgccgtgccggatgatgttcgcgttatcggcttcgatgacgtggaggaatcggcctacatggtgccgtctctttccaccgttaaccccggcagggaagccatcgcccgactggccgtcgaatccatcatccaacaggtcgaatccggcagccgtgcccccgcccaaaccatcgaggccccctatagcctctccctgcgcgagtcctcaccggcgttggcgcgcgcctgatgaatccgtggttcgaaatatccgaagtgaatgacaaggcccgtcaatcgtatggtgattgacgggccctggtcgtattggacttgactgtacttggtacgggcgtgactctccgtcttttagccgtggaattccacgctgatccaggagatggcgggaagcgttgccgtgcaggtgccggtggcgttcattgcaatgtcgagcggttgcggcgtgacggcttcgggcgcttcggcggtgttggtgcggtacggatcgtcctcatgcaacagttgcgccttgctgagcgcgagcgtgccgaggccgggcaggccgggcagcccggaaaggtcgatggtgagcgtgtgcggggtgttggcgtcgcggttgacggcaagcagcagaccggtgcgggcctgttcatcccacgtgactaccgcgtcgatggccggcacgtcgccgtatgcctcggtatggatggtgggggagctgatggccggagcgtaggcctggccgcgcgcgtgaagggcggcttcggcgaacgggtagaacgtggtctgccgccatgccgggccgtgttcctcggccatgatgggggcgatgacgttgaccagctgggcgcgcgaggcggaacgcacgcgatcgcagtgcttgagcagggtgatcatcagggaaccttcgaccaccgcgtcggccgcggtgtagatgtcttccagcaaatgtggagacttgggccatggctcgtggtgcaaaccctgcgcggcctccgccttccactggtcttcctgctcgttccacttgtccgaataccatacgccccattcgtcgaaggacagggcgatgtctttggtgccgttgttggcttctcgcgcctgatcggccgcgtccgagacggtggcgatgaacttggtcatgtcttcggaagaggccaggaagtcctgcatggaggcggcggtccgggttttatggccgcggtcgaagtagtaggcatggcaggagacgaagtcgagattctcgtaagccttggtgagcacggtcttctcccacgtgccgaaggtcggcatataggcacccgaggaaccgcaggccacgagttcgagaccggactcggcgagcttcatggcgtgggccaccttatccaccgcgccggcatattcttccgggctcatgtggcccacctgccacgggccgtccatttcgttgccgatgcaccacatcttgatatccatcggctcctcgatgccgttggccacgcgctgatccgcccaagcggtgccgggcgcgccgttgacatactcgagctcgtcgagcgcggctttcagcccccgggtgcccatgttgacggcaagcatgatttcggtgccggctttctggctccagcggtagaagtcgtcgatgcccatctcgttggtttcggtgcaatgccaggccaggtcgcggcgcacggggcgattctcgcgtggaccgatgccgtcttcccagttgtagttggatacgaaattgccgccggggtagcgcacgcaggtgacgcccagctccttgaccaggtcaagcacgtcttggcggaagccgttttcgtcggcggtgggatggctgggctcgtagatgccgccgtagacgcagcggcccagatgttctacgaatgagccgaacagacgcgggggaacgtcggctaccggagtggcgtcggcgttgagggcgatgctggcgtccggcgtggttgcgttgccagttgtggagacgttactggccgtggtgccggcggcggtcggcgccgggctgctttcctgcttgtcgggatgggtggtttcggcggaatactggctgttgtgagtggtcatgagcgggatgcatctccttcggtttgcggttagtcaccatggtgcgacgtgtcgtgtttgcgtaaacataaaacatgtggtaccgtttcttaaaacgatacaaggcttggaacaaaacgccaagtcccgtcgtttcccataacaaggaaggaaagaacgatgaagttcggcaagaagacgattgccctgattggtgctgtggccatgctctcctctgtagctgcctgcggttccacttctgccggggatggcggaagcaccggctcctctgataagaaggtcgagctgaccgtgtggtcctgggattccacactgcctcgtacggtcaagggattcgaggccaagaacccgaacattaaggtgaaggtgaccaacgccggcaccaacaaggacgagtacaacgcactgtccaacgccatcgaggcaggctccggtgctccggacatcgcccagatcgaatactacgcactgcccgaatacgtgattcgcggccacctcgagaacctttccgatctcggtgcctccgatttcaaggacttctacaccccgggcacgtggtcctcggtgaacatcaatgacggcgtctacgccctgccgatggattccggcccgatggcctggttctacaacaagggcgtcttcgacaaggccggcgtcgatccgactcaggtgcgcacgtgggacgacttctacgaggccgccaagaagattcgcgccgtggactcctacatcacctccgattccggtgacgccggcttcttcgactccatgacctggctggccggcgcgaccccgttcgagacctccaaggacggcgggaccgtgaccatcaacctgaccggtgacaagaacgtcaagaccttcaccgacttctggcagaagatgatcgacgaagatctcatcgacaccaagaccgtcggctggaccgacgattggaacaagggtctggatgacggctccatcgcatccctgctgaccggcgcttggatgccgtacaacctgctttccggcgctccgaacggtgacggcaagtggcgcatcgcccagatgccgaccgcagacggctccgagaccaactccgagaacggtggttcctcgctggccatcgtgaagtccgacgacaaggacaaggtcgccgccgcctacaagttcatggaatacgcctgccacgacgccgagggcatcaagacccgtgttgacggcggcgccttcccggccgacaacgacaccctcaagtccgacgacttcctcaacatgacctccctgaccgactccgacggcaaggcccacgagtacttcggcgggcagaagttcaacgaggagctggccaaggccgcagccaatgtgtccaccggctacaagttcctgcctttcgaggtctacgctcgcggcaagttcggcgactacgccggcgatgcctacaccggcaagaccacgctctccgatgccgtggcttcctggcagaaggacctgcaggattacgccaagcagcagggctaccaggtgaagtaacggcaatcacagcagacttcctcctgtggtttctgtagcgggaggttgcgataacaggatcgggcactcttcggagcgcccgattttcttatgccatgggagcagtggcgcgcggattgcgataccaagatggcgtgttgccgaagaatgtgtataataaaagatgttatcgcaaccatagctacaaagtggcgaaacaaagccgttttgtgactactgaaccatagagtgatggttcacgatagcatgacgacgaggagagttgccatgctgttgtggtgacaatcactgcagaccgccgaaaggcgatccaaggaaggagaacagaacgatgaagttcaccgttgctaagaaggccattgcacttaccggtgcggttgccatgctgggttccgttgccgcctgcggttccgacaccgccagtggcaagccggctcaagataaggacgttaccgaaatcaccgtgtgggcttgggagcccacgctgacccaggttgccaaggacttcaccaagaagaccggcatcaaggtcgatctcaagaacgtcggcaccaacaccaaggaatacacccagcttgataacgccatcgaggctggctccggtgctccggacgtcgctcaggttgagtactacgccatcccgcagtacgccatcaagggcaacctgctggacatcaccgacaagacctccggctactccgacttctacacccctggcccgtgggcttccgtgcagttcgccggcaaggtctacggcctgccgatggattccggcccaatggccttcttctacaacaaggaggtcttcgacaaggccggtgttgacgccgagcagatcaagacctgggatcagtactacgacgccgccaagaagattcacgctctgggcgacaactactacatcacctccgacaccggtgacgccggcttcttcgactccatgacctggctggccggtgcaaagccgttccagacctcttccgatggttccgaagtcaccgtcaacctgaccgaggacaagggcgtcaagaccttcaccgacttctggcagaagctgctggacgagggcctgctcgacaccaagaccgctggctggtctgaggactggttcaagggcatggtcgacggcaccatcgcctccctgttcactggcgcttggatgcctgccaacctggccaactccgctgctgacggcgctggcaagtggcgtgtgacccagatgccgaccgctgacggctccaccaccaactccgagaacggtggttcttcgctggctgtgctcgcctccaccaagaaggctgacgctgcttaccagttcatcgagtacgccaaccacggcgacggcgtggccacccgtgtggccggcggtgcattcccggctgacaaggcctccatggagtccgactccttcaagaacaccactactgtgaagaacgccgatggcgaggacgttgactacttcggtggtcagaagtacaacgaggttctggctcaggctgctgagaacgtgtcctccgactaccagttcctgccctacgaggtcaaggcccgcaccatcttcggcgactaccttggcaagtcctacaccggcgaccagaagctgactgacggtatcgccgcttggcagaaggcactgcaggattacggcaaggatcagggcttcaccgtgaagtaagccttgaaccctcgctgagactgcctagctaatctcacctgatacacaaagccccgtgacgaatcccgtcacggggcttttaccgttttaagccccgcctagtacactcgtcaccatgcgagtgatcggacagcgaatcaaaagaatggcaaccatagcagtgactgccatcctttccgtatccctggcctcgtgcgggcaggccacggacgacaaccgtacggagatcagcgtatggagctgggaaccgagcatgggggaggtcatccgccgtttcgaaaaagccaatccggacatccgcgtgaaatggaccaatatctccggctatggcaatcttaataccgccattcaggacggttacggcacgccggacgtggctcaaatcgaatactatgcactgttgcagtacgcggtctccggccaattgcttgatctgaccgacaaaatcggctcggattattccaacttctttaccctcggcacatggtcgtccgtgcagctcgccggccgtacctatggactgcccatggattcgggcccgatgggcttcttctacaacgaagacgtgttccgccaagccggcgtggacgccaccaagatcaagacttgggatgactattacgaggccgccgaaaagctcaaggagatcggcgcgtatatcgccgccgactcgggcgacggcagtttctatgacgcgatggtctggctcgccggtggtcagccgttccacacgtcggccgacggcaaaaccgtgaccatcgatttggatgaggacgccggcacccaacggttcaccgaattctggcagaaaatgatcgatgaggggcttgttgacaccacctccgccacatggtcggatcggtggaagcgccgtgtgggcaccggtaccatcgcctccgtgttctctggggcctggatgccgtcgctgctgctgtccaatgtgccgggcgcggccggtctgtggcgcgtggctcccatgcccacctatggtgggcagcctgccaacgccgaaaatggcggctcggcgctgaccgtgttgcaactgacccgtaagccggatgcggcctatcgtttcgtggactttgtggcgcatgacgcccaaggcattagcgcgcgtgtagacggcggtgccttcccggccgattacgccaccctgaattccgctgattttctggataaaaccacgattaccaatgaccgtggcattgaaatcccgtatttcggcgggcagaagttcaaccgggtactgtcggaggccgccgaggatgtgtcggtcggataccagtatctgccattcgaagtgtatgcgcgcagtgacttcaaatcgacggtgggccaggcatacgagtggtccggcagtttccacgcctatcagcagcgacaggaagccattgagatgggcatgaaggacgaggaaggcaacccgctcgaaccgttggagaagcccggcaagaaagtcagtctctccgacggcctggcccaatggcagaaagacctccgagaatacggcttcaatcagggctttacgattaagtagggattcggggttgggtcggaatcgaccgcgctatacgcggccgattcctgcatactacgtcacttcacattgcgcgagtagatgtgcgccatgcccttgaaaatcaaatccgggtcatacacgtcaatcagctcggtgtcattctcaaacactcgaccgaggccaccggtggtgatcaccttgaaatcctcgcctccgagctctctgcggaactgacgaatcgtgcgctccacaccgcccaagaacgtgtaatacaaaccggcctgcatgcaggtcttggtgttggtgcccagaatcgtatccggtcgcgtaatttccacttccggcagctgggccgtatctccccacagagcggccgcaccggcacggatgccggtggtgatgacgccggaatcgaccacgcccttgtcgctcacgtgcgtgaacgtggtggcggtgccgaaatcagccaccagcactgggccgccatactcgtaataggcaccggcgcagtcggccagaatatccgcacccagcgatttcggatcgtcaacgcgcacgttcataccggtcttgatgcccggtcccaccaccatcggatcaatgtcgaggaatttgacgatggacgaacggaaggagtgcatcactttcggcaccaccgaacagatgatcacatcgtccacatcggatggctgaaaaccgctcattctcaggaattcagtcagaaacagcccatactcatcagacgtatggttggctttggtggtgatgcggtaggtgccggcgatggcatcgccatccaaaaagcccagcacgatgttcgtattgccgatatcaacggcgaccagcatgataaccctccagattcaagatggatttcatgcgcaattctacagtcccatggctatgatggcctgcggtggtcgacccagcgtggcggccaaccgtagaacacaacatatacagaggaagaaccatgtctcaagacaatggtgcgcacgtcgaagacggcgcaaccacagatgcgagccttgcctcgcgcgcaaagaatccgaaaaaaagcggcccgaagtggtggctgatctcactgattgccgtcatcgtggcagtggcggtcgtcatcggcgtcacgctcgctttcggcggtaagaaagatgacaagtcggcttcgtccagcaaccaatatgccgacaccgtgaccatcggcctcaaactggcccccaccaatctggacatccgcaacaccgccggctccgcgcttgaccagatcctgatcggcaacgtatacgaaggcatcgtggcacgtgactccaagaaccaggtcgctcccgccatcgcctccagctgggagacgtccaaggacggcctgacctacaccttccacctcaataagaacatgaccttcttcaatggcgacaaacttgacgccgaggacgtggcctggtccatcaacgagctgatcgctaagggctaccacgacgccgacgcgctcgccgccgtcagcaaggtggaggccaaggacgccgacaccgcggtgatcacgctcaagacgccgaactccaacctgttgtggaccctgaccggtcgcgcagggctcgtgttcgacaaggacgccaagtatgacctgaagacgcaggccgtcggctccggcccctacaccgttgccaagttcgtggaaaacagctcgatcacgctgaaggccaatgagaagtactggggcaagaacaaggccaagacgcccaccgtggtcgtcaagtatctggccgacgacaacgccgcggtcaatgcgctgaagtccggtgacgtgcaggtgctcgccccgattaccgagaacctcgccgaaccgttcaagtccgattccgccaagtacacggtcaaagccggcaacggcaccgacaagttcgtgctcggcttcaacaacgcttccggttccaaactggctgacaagcgcattcgccaggccatccgttacgccatcaaccacaaggagctcatcgcctctcgcggcggtgcggacaaggcgctcggcggcccgatcccgtctctcgaccccggctacgaggatctgacgaatctgtacccgtatgatcagaacaaggccaagtcgctcatggctgaagccggctattccaccgacaagccgcttcaacttacgctgacctacgccaacatctacggcaccgagctcggagaccagctgcgctcccagctcaagcccatcggcatcgacctgaaggtgaatgtggtggagttctccacgtggctgcaggatgtgtacaccaaccacaccttcgatatttcgctggtggaccacaacgaaagccacgacttcgcatcgtggaccgatccgacatactatttcggttacgacaacaagaatgtgaccaagctgtacaacgagggtgttgccgccacctccgacaaggagcgtgatgccaagttcgccgcggccgccaagcttgtctccgaggatgcgccggccgactggctgttcaactaccgcatcaccaccgccacggccaagggcgttgaaggattccccttcgacctcaaccagaccgttctgcccctctacaacgtgacctacacgaagtagttcgttacagcaatgagctccctcagtgagggggctcattgttaatccaagtaaagtaggcattatgcgattcgtgttgaaacggctggcgttattcgtggtggcgttgttcggcctgtccgtggtggttttcgcagcattgcgcattctgcctggcgatgtggcctccgtgatggccggcgtcaactcgccgcctgagcgtgtgacccagctacgcgaacaactcggtctgaatcggccattgattgcacaatacttcgattggatgagtgcgctggcccgtggtgacttcggcacttcaatcctgactggtcgctccgtaacctccttggtaggcgcacgtgcgtccatcacctttcccctgattattcttggcctgctcatcgccttggccatcggcttgccgctgggctgtgcggcggtactggcccgcagcgcaacggtgcgtgcggtgtttcatgtactggctattgtcggcggtgccgtacctgcgttgtggggcggtctgctgctgattctgttgttcgggcgcggcgtaggattgcttgacgtgtttccctcgcaagggttcccgctggatggctggggcgcacccggttcggcgatatcagcgttggtattgccggctgtatcggtcggcatcatcgtgggagcatcgcttatgcgatacacgcgcgcggccttaggggatttagccagttccggctacatcgatatggcatgctcgtgtggcatgacgcgcactcaggcggtgttgcgtgtgggattgcggttggcaaccccgcagctggtgtctgttatcgggctgaccttcgcttcgatggtcactggcgtgatggtcatcgaaaacctgtttgcgttaccgggcatcggcaacggtcttgtgaccgacgtgggcaaccgcgacctgattgccgtgcaaagcgagctgttcctgctggccgcgttctttttgactgtcggcctcgtggtcgatttgctccaccgcgtgctcgacccgcgtctgaaaaccgctaccgccattacggaggtgaccgcatgagcaatgttcgtcgtgcgacgactggtggtcgacgggctgccttcgtcatcgtcctgcactctatgtggcgtcgtgccgagggcaaattcgcacttatcgtgctcgctctgtggttgctcattgccatcgtttccctgttctggaccccgcaatcgctgtgggccactgatggctaccatgtatgggccaagccgtccgccgagcactggctcggcactgacggcaccggcgcggacgtgttcagctggctgctggccggctcacataccaatcttgtgatcgtgctgctgaccgtagtggcatctatggcttgggggctgctgctcatcgcggccatggtggcacgcaatgcggcgctcgccagttcttcggtagtggtagttgatgcgttgatttccgttcccaccgtgttgattgcgttgattctggctgtgccgttgggagcgtcaatcgcggtgattgtgatcgcctgcggcttcggatatgggttgaatctggctcgtgtggctcgccccgcagcgttgctggcggcccgctcgtcgtatgtggaatcggccttggccaatggtgccagcgggtggcgtgtgctcataagccatgttatgccgaatattctgccggtattggctgtgcaactgtcattgtcggcgggcacggcggtgttggctgagtcggggcttacttatctcggtatcggtgtgccgtccggtgtgccgagctgggggcattctctggccacttcggtcaaactcatcaacgtgttcccattaaccgtggtgtggcccggcctgatcgtcacggttgtggttgtggcgctgaatatttttggtgatgtgctgcgcgatgccatcgatccggtcaccaaccccgcattacgtgaaataggaggcgaacgatgagcgtcgatgttcgcgggttgaaaatcacgattggcggcaaaccaatcgtctctgatgcggatatgaccattgccgacggtgaacgagtcggcttgatcggttcttcaggctccggaaaatctatgattgccaaggcgatgctggggttgctgcccctgaccgctgtgactaatgggtcgattgatatgggcagcacggaaattatcggagcttccgaacgtgcgcttgccgacctgcgcggccggtatgtgggtgcggtgttccagaatccggctgcctcgctgaacccggtgatgaccgtggcgcagcagatcgccttgccattgcggttgcactatgatctgaccaaggtcgaacgagccgaccgagtgaatgccttgttgagcaaggtcgggctggatctcgatatggccggcaaatacccgcacgaactgtccggcggccaacagcagcgcgtgggcatcgccacggcgctgatcacctcaccgcgattcatcatcgcggacgaacccaccaccgcactcgactccatcacgcaacgccagatcgtggacctgctgacctcgctggtggacgacgccggtgcctccatgctgttcatcacccacgatttctccgtactcgcgcgtgccaccacccgctgctacgtgctggacgccggccgcatcgtcgaatccggacccaccgccgacctgctcgccgcgccgaccacaccacaagcccagcgcctggtcgccgccgcccaaaccctcaccctccacacccccaaggaggattcgcatgagtaacagcagtgtgccgctcctctccgcccactccatcaccaaatccttcggcccgcgcaccgcacgccaccaagtcctcttcgacgtctccgccgacgtccacgccggcgaatgtctggccgtgatcggcggctccggatccggcaaatccacgctgacccgcattatgctgggcttggaatccgcggactccggcagcgtggaatacgagagccaatccattgtcggcggccgaaaatcgccgggattcgcggccctgcgccgcgaatcgggactggtgttccaggacccgttctcctcgctcgacccacgttggcgagtcgccaaatcagtggctgaaccgctgagtctgcaacggcgtgacctgaacaacaccgatatcgacgagcgagtggccgcggctctgaccatggcaggccttgaaccggcagacttcctgaaccggtacccaatcgacctgtccggcggccaggcgcagcgcgtggtcatcgcccgcgctatcatcaacgagcccaaagtgatcctcgccgatgagccgatgagcgccatcgacgtggccgcgcgcattcagatcctcgacaccttcgccgccatccgcgcggcccggccgagcaccgccatcatcatggtctcccacgatctcggcgtggtacagcacatcgccgaccgcatcctcgtgctccatgacgggcgtctcgaagagacgggttccaccgctgaagtgctcggcaacccccaatccgattacacccgtcagctcatcgaggcagcctcgttatagaccttttttggctccctctctgaggggagctgtcgaatgcagtgaggctgaggggagttacgggtgccgtcgtattcccctcagtccgcttcgcggccagctcccctcagggaggggagccgaggccgccggcgacacgcgcttgtcgcgggttgtgctatggtgtgagacatgcagattatctcatgttgttgtcgctaaccgacgcccctgggcgagcggtcagtgacgcataacttgagatagagcattcgaatcgcggcaaatctgtcgcatgaattttcatgaaatcgatggcacgagcgtaaccgtgtaacgcgcgagtcgtggttaacatgaaaaaccgattcactttccggcttcaccgtacagtgagcggggatactcgatttcaaactaaagccacagtccattcgtctgggaacgtcggttcacgaacgcaacgcagcaaaaccccacaaccccagcaacgaaggacttcacatgaccatccacaacagcctcgcagaactcatcggcaacaccccgctcgtcaagctcaaccacattccgcaggcggccggcgtcaaagccaccatcgccgtcaaagtcgaatacttcaaccccggtggatcttccaaggaccgcattgccgaacgcatcatcgacgccgccgaacagtccggccaactgaagcccggcggcgtgatcgtcgaacccacctccggcaacaccggcgtcggcctggccctggtcgcccagcagcgcggctaccgcacgattttcaccctgccggacaaggtctccgaatccaagcgcgcggtgctgcgcgcctacggtgccgaagtcatcgtcacgccaaccgacgccggcccggacgacccgcgctcctactatcaggtcgccgaacgactggccaatacgattcccggcggcttccgcccgaaccagtacgacaatccgaacggcccgctgagccactactacaccaccggacctgagatctgggaggccacggaccacaaggtcacgcacttcgtggccggcatcggtaccggcggcaccatctccggcaccggcaagtacctcaaggaagcctccaacggcgcggtcaaggtcatcggctccgacccggaaggctccatctactccgcttcctcacgcgacgaagtccaccagtacgatatcgagggcgtaggggaggacttctatcccaaggccttcgaccggaacatcaccgacgacatcgtgcgcgtgtccgacgccgaagcctttgaaatgacccgccgtctggccggcgaggaggcgctgctggtcggcggctcgtccggcatggccgtggccagcgccatcaagtacgcgcttgccaatgatttggacgagaaccagatcgtggtggtgctcgcccctgattccggccgcagctacttggagaagatcttcaacgacgactggatgcgtgccaacggctacggcgacatcgtggagcgcaccagcaagccctccctcgccgagcagtaccttaacggagctccctctgatgagggagctggggacggactccataactagctatcaaaagaatcaataccaacatccgcactaaccaaccgcacctgttctaccttcgaatacggaacgatcccgaaaggaacccaatatcatgtccgctgaatacaacgccaagttcgccaacaccgacatcgccacccgcgccatccacgccggccaggagcccgacccgaccaccggcgcggtcgtcacgccgatcttcgccacctccactttcaagcaggatggcgtgttgggcctcaggggaggccacgactactcccgctccatcaaccccactcgcaccagcttcgacgagcagctcgccgccgtggaaggcggcaagtacgcgctgagcttctcctcgggcttggccgccatcgacgtgctgctgcgctccaccatcaagcccggcgacaacatcctgctcggcaacgatgtgtacggcggcacctaccgcctgctctccaaggtgttcgtgccgtggggtgtgggcctcgacgtggtggacatcaccgatctgaaagccgtggaaaccgcattggcctccaagcactaccagtatgtgtgggtcgagaccccgtccaacccgctgctcaacatcaccgacatcgcggccaccgccgaagtcgcccacaagtacggcaccaaggtcgctgtcgacaacaccttcgcctcgcccgcccttcagcacccgctggccgatggcgccgatgtggtggtctactccaccaccaagtacatcggcggccactccgacgtggtcggcggtgccgtggtggtcaacgacgaggagacccgcgagaaggtcgccttcctgcagaacgccgccggcgcagtgccctccccgttcgactcctggctggacatccgcggcctgaagaccctggatctgcgcgtcaagcgccacagtgccaacgccctgaaggtggccgaatggctcgaatcccagccctctgatgtgattgagcgcgtctggtacccgggcctcgagtcccacccgggtcatgaaatcgccgcccgccagatgcacggcggcttcggcggcatcgtctccgtgcagctcgcggccggcgccgaggcggccaagcacttcgtggaccacacgcagatcttcacactggccgaatcgctcggcggtgtggaaagcctcatcgaggtgcccgccgccatgacccacgcctccgtggccggcaccaccctgcaggtgcccgccaacctggtgcgtatttcggtcggtatcgagaacgccgacgaccttatcgccgatctcaagcaggcgttggatcgtatctgaccgtactgacggtactggtggcaccgtattgacggtgccaccacgcttatcggcggactcgctatcgattggtacctacaaaaaatccccggcccacaagggtcggggattttccgttatcgattaaacatattgaatcagctggcgttgccgccctgccatccagtggcatccgcaccagccgggcgcaacgtctgaccggaagtcggtgtggtgccatcaacgaccacacgagtgccgatggtggcaaagtcgtacatccacttggcgtcggccacctgcatgttgatgcagccgtgcgagcctgggataccctgctgcacatagatggggtgctcgccccacatgtatgcaggaacaccgtgcagagcctcgccgccgttatagtaggaaacccacggcgtgcctggctggttgtagccttcgccaaccatggtctgcgattcgtacttgagatacacgtagaacgtgccggtatcggacagcatggaaccatcggcggtgggcttgccagaagcgatgttgaacttcctgaccaccgtggtgccctgatatgcagtggcagtctggttcgtcagatcaacatgaacccacttatcgccatttgccgtaccgaagttatgaggcacctcgacctgcttgacatcatatgggctgtctttcacagccacagtggaatcagtggaccggttctgctcgatggcggtagccagacgttcgggggcgtccccggcgccagtcacttcaataccatccacgccgagtgtcttatcggcaccaatttccacgccgccttcgtctttcggcgtgatgtagacctcgcgtgtcaccttgggaacagtcagttctttggttacgctgtcactggtgacgtacttggtgatggcatcgcggtcgactaccagactcatggtgccttccgccttattcgccgtgggcttgaggaatgaggcaatggtatcggccgggatggtgacgctcttgttcacgccgttgtccacggtcagtttgaggccaagcctggcattggcgtcaaactgtgtttgctgtgcgctcgcgtcatcaatcggattctttgcggtctgtagcttgaccggcaccgtcgcattttcgcccggggtcgcgacggcctccttgactgcagcattgacaacattgatatccgggcccttgccgtcctgacccgcggtgtaatcgaactgcttggtgctcttgttgtagacaacggtggcaatctgcgctcggtcggcctcatcgaccaggccggcggtgacgaattgttcggcagtctctttgtccgtggtggcggtcagagcgatatgcggctgatcgaaaatattgagcttggccacgtcgccggtcttcgcgttcaacagcgcatccacggttttatccgtgtcgacggtgacgccaaggtccttcagcgaggctttgacgctgttgccttcggcggtgaacgtcaccgtggtgttattcagccgctgcttcacagtattcgcaagttcttcgcgggtctggcccatgacagagacattgcccaaatgaacaccgggcgcagccttgtcttggaagtaccaacgtccgacgaagaaataggatattaatgcggcaagcaacactgcaaatatggttatgatggcaatccgtgcggccttgccatgtgatttagcggtggtagatgccataacatgttcacccacataggctgtattgtcggcatggttattggtgccactgtcactttgctgtggtgtggcggtacctgaatccgcggctgcgaacagcccatcggtggccacaggctgcagcaccgccgtctcctgatcgtcaggagaggagaaggaaaatgtatcgttggccatcaaaatgccccgtcttagttctctcaaagcggcatatcgtgcgatatgccgggaataacgttccttgacgcataataatacggaagggctacgtatatcgttacgaggtattccgttatacactgaaatccagccgcggtcggcctacactggtcgtttatgacagcacatcaggcggcgctggaggcgctcacacgatacttcggctatgactcgtttaggcccggacagcaaggaattgtcgaggctttgcttgccggacgcgatgtcttgggcgtgatgcccaccggcgcaggcaagtccgtgtgctaccagattcccgccgcgctcagcccgggtgtgactttggtcatatctcccttgatttccctgatgcgtgaccaggtcgatgcgctgaacgacctcggtctgccggccgcgttcatcaacaccactcaaactcccgacgagcaggcgatggtgttcgcccaagccgccgccgggcagatcaaactgctgtacgtggccccggaacgcttggaaaccgggcgattccgcgactttgccgcccgtacgccgatctcgctgatcgccgtggacgaagcccactgcgtctcccagtggggtcaggacttccgctcgtcgtacttaggtatcggcgatttcatcgccgggctgccgcagcgtccaccggtgggtgcgttcaccgccaccgccaccgaacgggtgcgccgggacatcgtgggactgttgggattgcggaatccggccgtcaccgttaccggattcgaccggccgaacctgtattttgatgtggtcaaactggaaaccaaatacaaggccgcatgggtggcacggtatgtggccgaccatccggacgaatccggcatcgtctactgcgccacccgcaagaccaccgaagcgctcaccgacacgctgaaccagatggggcatccggccgtcgcctaccatggcggcatgtcgccggacgcgcgtgaggcggcccagcgcgacttcatcaccgacaaggtgccggtggtcgtggccaccaacgctttcggcatgggcatcgataagtccaacgtgcgttacgtcatccaccacaatctgcccgaatccattgaggcctactatcaggaggccggccgcgcgggccgtgacggcgagcccagccgatgcacgctgctgtggaatgagtcagacatcgtcacccggcgtcggttgctggataacgattatgagaacgagcgattgactcccgaagagcaggaaatcgttcgccagtccaagcgccggctgctggacggtatggtcggctactgccgcaccaccgactgcctgcaccggtatatgacccggtatttcggtcaggaattgtcgccgaatgctggttccacggcgggtgaagacattgcggcggactcttcgcagtccggcaaatgcggtgcctgctcgaactgcgaaagcacgttcgagaccatcgacgtgacccgcgtggcgcaggcgatcagccgttgcgtgcatgacgtggggcagcgcgtcggttccggcaagatcgtcaagatcctgcgcggttcgcgggcacaggatctggcatggctgaacccggagcggatgcccaccttcggcatgctcaaggacgtgaacgaggctcgcgtgcgcgacgtgttgagtcagatggccacggacgggtacctgtcaatcgccgaagggcgtatgccaatcgtcatgttcggtgcgcgggcggccgaaaccgccgctcccgacttccactatgagatcaaacgggtggaacgcaagtcggcggcggccggttccggtcggagcgggggagtggctgatactgccgattccgccaatgttcccggcgatgcgctgggctcgtatatcccggacgatgacgaggaatcgctgttccagaagctacgcgaactgcgacgcaccatcgcccaggaaatcggcaagccgccgtacatcgtgttctccgacaagaccttgcgcgacatggcccgcatcaagccggttaccaacgcgcaatttctggcggtcaacggcgtcggtcaacacaagctcgacctctacggccagcgcttcatgcagaccatcgcctcgttcaatgccgggagtacgtcataacaatctcctatagcgaactgcggagtatttgcgggcgttcttgggctggcacgactacgatgactgttcgatgcttcatgaccgaacactcagcaagtagaaaggcaacagcatggcagaagaaacggccgaaaagcccgtcgtcgaatcattccagcttgatcacaccaaggtcaaggcgccgtacgtgcgttacatcgacaccgaaacgggccctcacggtgacgtgatctccaactatgatctgcgcctgacccagccgaacaagcaggccatccccaccggcggcctgcacaccatcgaacacaccatcgccgtgctgctgcgcgaacgcattcccggctacatcgactgctcgccgttcggctgccgcaccggcttccacctgctgacctggggcacccaccccaccgaggaagtggccaaggccttgaaggaatcgttggagttcatcgcgtacaaggccacgtgggatgacgtgcccgccaccaccgagaagagctgcggcaactatcgcgaccacagcctgttcaccgccaaggaatgggccaagcagatccttgaggaaggcatcagctccgacccgttcgagcgcaaggtcgtctgatcgcaagccaatcggcatggaagaaccccgcccccgcataccacgcggacggggtttctttgtgcctatgtttgtgcctatggcatggtaggtttgccgtcagttaatcgttggccgctgcacatcggtagcctggcatgttggagaggtggaagtgactcagtcgaacgctgcaaacaaggcgacaggccgccgtttccgccacgccaccatgcgcgatctgccgcagatgcagaaaatctacgcacgcgcacgcgcgttgatggccgccaacggcaaccccacccagtggggcaacgaatttccgcgtgaatcgatgattgaggacgacatcgccaaccagcgtacgatgctgctggtcgacacctgcaatggccacgaacgcattctggcccagttcgccctgtgcccgggcgaggatccgacctacgccaaaatcgacggcgcctggctggacaacgacgcctatgtgaccatccaccgcatcgccgcatccggtctggtgcgccacgcggcccgcgactgtatcaggtgggccctgaagcactacggcaacgtgcgcgccgacacccaccccaataacaaggccatgcagcacgtgctcgaaagctccggcttcgcccgttgcggcctgatccaactgctcgaccggccggtcgacaccaccagaatcgcctatcagcgccacgagtggtgagtgtggctgccggctgatgtgctcgtttctgcaccgtcatcggtttctgacggtagaatcagtgtgtgagaagaacacgttgggtcgggggcgtcgtgacggtgcttgcggctgtcatgctgtcgtcgtgcggcggcgtccagtcgaatcccgggtaacacaccgttgccaatccattcaccgcgcaggtgaatggagaagacatggcgatgcctgtcggccgatggagccccatcggccgacaggcatcgaggaagtcaccgtggccggcggaacgcgcggtcgccgattggggcgaatggcttgtgtggttcgctttggtaccagtaggcgaccgtggccacgtcgtcctgtcgttcgaagttgccggcttcctcggtgccgatctgctgccattcgacgcgcaggtctcgctcgaagtagatcgggtcggggatgtgccaacggtataggccgcgggtcacgggggtggcagtgtcccagtaggcgctttcgcgtccggcgaggttctgcgagtagaacgggaagccgaggtatgggccggtgaaggtgcgctcgtacatgcggccgtgttcgtcgaattcggcgaagctccaggcaccgccgaagtagtcctcggcgccggtgctgcaccaggtggggtatttgccgtcgccgtcgatgtagaacttgaattcgccttcgccccaccagcggctttcgagcgcggtgagcgccaggtaggtgccgacgtaggtgccgtgtccttcgacgccatcgagcaccacgtagtcgtgggcgagttcggtgacgcgttggcggcgccactgcgcgtggaagcgcatcgtgtcggccggcagctggtcgtattcggtgtagtcgatttggtagaagaacgcgggcacgtcctcgttgtggtcgttgcgcagcacgatgcgcgcgtgttcgaacggcatggcgaagtagcagttgaagccccggttcgggttgaccatgacgggaattgagttgatggtgcaggaccgggcgtgtccgcagcagaagaagtcgccgatcgggcattgcaccgagggggagtcctcgccgtcccagtagaattccaggatcaggttgcgtagcacgtcggggccggtgggggaggtgcggtcggttaccgtcatccagatgtgacggattacgccggggccctcgacgtccatcaaagtcaccgattccccggacctcaccgtgctgatgcaggggcttcccttgcgggaggggcccaacgcgctggccgccatggccgcgcggcccttgccgccgtccgggttttcggcgttgatgcagcgggtgcggccgggtgccctcatggccacggcatccaaggcgccttgtccgagccccggcgcggggttcgctgtggtgaatgcgtcgagcatgatgcttacttcctttcctgtcgcaggcccggcccgccacggcgttttgtctggggcgggctgggctgctggggggtgttatttcacggcaccggcggtgatgccttgggagagcttgcgctggggtagcgtcctatatcttgcgcactttggtcttcgcccgtccctgcggcgatgatcggttcgcttcccgtacggtctcaccgagtcttgacatgtcgaggtagcggcgcgtcgaccactcgttcgacgtgatataacgcacgcgtgcgcagacgagcatcaacgcgctgcgtccgtcggggaagctgccgaccacgcgcgtgcgccgtctgacctcgcggttgcgggggtgaccctggtgaggacgttgcgttcgaagtgcaccatgcaccgctggtagcgggcatcgcgttcaaggtctcctcgacgctttttctgaccatccggtccagggtggtctccgacatggcctcatatcgcaaaaaccgtacgctgaaagtaactcagcgtacggttttcacgaaagcagccatcggctatcggtcagccgatagacctcagtcctcagtcgcagcgaccttggcgtcagccccggccttctgctcaaggccgagcttggagcgcttgcggctgtagccgaagtacacgatcaggcccagaccgaaccagacggcgaaacgcacccaggtctcccagttgagaccggcgatgagcacgaagcagaatacgatggccagaatcggggtgaccggcacgcccggcgcgcggaagccgcggggcgcattcggctgggtcttgcgcatccatagaataccggccgacacgatgatgaacgcggacagcgtaccgatgttcaccagctcgaacagcacgttgatgttgatgaagccgccggcgaacgcggtcagcagaccgaagaaccaggtgcccttgaacggggtacggtacttctcgtgcacgtggccgaagaacttcgggaacaggccgtcacggctcatggcgtagcagatacgggattggccgtacagctgcacgagcatcaccgtggtcatgccgatgagggcgcccaggttcacgatcaccgcgagccagttcatgccggtctccagaatcacgccggccaccggggcgtcgatgtacttggcgaactccttgtagggcaccacgccggtcatgatcatggtcatgacgatgtagagcacggtggaaacggccagggacagcagaatgccgcgcggcagcgtcttgttcgggttgatggtctcctcagcggaagaggacacggcatcgaagccgatgaagctgaagaacacgatggaagcggccggcacgatgccgtacggctgggtggagccgggctggaaagtgtagatgccgtacggggagaacggctgccagttggacggcttgacataccacacggcgcacacgatgaacagcacgatgatggcgagcttgatgagcaccatcacgtcattggtgcgcttggtctggttgatgccgatggagagcacccacgtgatgatgagcacgatgacgaaaccgggcaggttgaagtaggtggtgacgtccgggttggtgccgtaggcggcggtcagctcgaccggcaggtgcaggccgaagccttccagcagtttgttgaagtagcccgaccagccggcggacactgtggccgcctgcagggcgtactccagaatcagatcccagccgatcacgaaggcgatgagctcgccgaacgccagataggcataggagtaggccgagccggacaccggggccatggcggcgaactcggcgtagcacagaccggcaaaaccgcagcagacggcggccagcaggaacgatacggacaaggccgggccggcggtcagcgcgcccttaccggtgagcacgaagataccagtgccgatgatcgcgccgatgccgagcatcgtcagatcgaaggtgcgcatcgtgcgcttcaggggagtggattcggcgacaagctgatccacgcttttcttacgaaacagatccatgttcttctctcatgaaatctaggattatggggctgaaccggacggatttccgggatcccggcacgcctcaacgccgggaatcaaaggcggtttccgagaaaccgcatatcggtcattagtgtacgactgccgggcgaaaacaaacgattgtgaccacacgtcacattcctgcgcaacaataggtgcctatgagcatgaacgcagcacccgaaatcgcattctcgtccgagcagggcaaggccaactatgcggccgcccgccgccaataccccgcacaggccatcgtggacctcaaaaccatgcgcgacaacatggcccacctggtctccgtggtcggcgggcccgcttccggcacggcggtgatgggtgtggtcaaggccgacgcctacggccacggactgctgcccgccgccctggccgcgctcgccggcggcgccacatggctcggcaccgcgcagtcgcacgaagcgttgctgctgcgcaagctcggcatcggccccgaccgctgccatattttgacttgggtatacaacggcaccgaagtcccgttcgacgagctgatcgccgcagatatcgacgtatcggtcggctccctgcccggcatcgacgccgtggccgccgccgcacgcaagctcggcaagcccgcccgcgtacacgtcaaggtcgattccggcttcggtcgcaacggtttcacaccggccggattcgacgccgcgctcgccaaacttgtgccgctcgccaaagagggcgtgttgcatatcgtgggccagtggagccatctcgccgtggccgattcgcccgatgtgtccgaattcgtgtcctccaccgaccgccagatcgaaacattcaaggacttcacgcgccgcatggaacaggccggcattccgccggagatccgtcacctggccaacacagcggccactttggaccgcccggagattcacttcgaactcacccgccccggcatcggcctgtacggctacgagcccgatcccgcgatgggcaccccgcgcgactggcatctgaccccggccatgcgcctgcaggcgcagctcggcacggtcaaggatgtggaggccggccacggcatctcctacggccgcacctacctgaccccggacaacacctcgaccgctattgtgccgctgggctacgccgatggcatccaccgctccgcttccggtttcgatatggaaggtgccaagcacgtggagaagccgggcggcccggtgcgcatcatgaccactgaaggtccgaagctctaccgcgtgtgcggccgcgtgtgcatggaccagttcatcgtggacctgcacggatccgccgccgaactcggcgttcacgagggcgacacggtcgaactgttcggcccgggccgcggcgaggattacgttgagcctaccgccgacgattgggcccgcgccgccgacaccatcagctacgagatcttcacctgcctgcgcaaccgcatcccgcgcctttacgagcatgccgccgaagtactgcccgccgccgacctcgccaagctcgaccccgccacgctgctataaggtgcattaccgccatacggtggcaccccgtaatcccttcttcccgaatatgtgccgttgacatgtgctgagcgtcacatattcgggaaatcggccccaatctcccgaatatgtgctgttgagttgacgtcagtggcacatattcgggaagtcgggattactgcggccgatatgtgtgcctatgcttggaatatggaaacgactttggatggggaacaggtgctgagcgatgagggctacagcgccttcgacgaggagcggtgggcacccgagccgcccaaatccaagtcgcgcacggctttcgaacgcgatcgcgcgcgactgattcattcgtccgctttgcggcgtttgggcgcgaaaagccagattctgattgccggtaccgacgatttcgcccgcactcgactgacgcatacgctggaagtcgcccagatcggtcgccaaatcggcgcattgctcggctgtgatccggacgtggtcgactgcgcctgtctggcccacgaccttggtcacccgccgttcgggcacaacggggagcgtgcgctcgccgacatcgccagcaatatcggcggcttcgagggcaacgcacagaccatgcgtatcctgacccggctcgaacccaagatctttcacccggacgggcgttcggccggcgtgaacctgacccgtgcggccttggatgcggccgtcaaatacccgtggaccttggccgaagccgaccgacacccgaagggggagcggtcgaagaaattctgcgtctacccggatgacgaaccggtgttccgctggctcaaaatcggcgcgccccaggccgccaaacccatggaatgccagatcatggacctttcggacgatatcgcctactccgtgcatgacgtcgaggattccatcgccaccggcgcgttcgatccgattgtgctcgccgatccgaagatgctggaccacatcatcgagcagacgcgcgcatggtatggggcgaagtgggatgccgacaagctgctggccgcgttcatgcgattgcgccgagagcatttgttccctgcacatttcaatggttcgcgcgaatcgttggcgcagcttaagaacattacgtccgatttgatcggccgcttctgctggtcggtggaaaccgccacgcgcgacacgtatgggcccgggccgttgacccggtattcctcgaacatcgtgattcccgagaacacgaattacgagatcgtggcactgaagggcatcgccgtgtacttcgtcatggcgcctcgcgagcgcgagccattccatcaggaggagctcaagatcgtatcggatttggtcgatgtgcttatggccgattcgccgctcccatccgacgctttggaaagccagttcctggccgattggaatgaatccaccaatgacaacgagcgcctgcgcgtcgccatcgatcaggtcgcaagcctgaccgacaactccgctctggccctgcactccatcttgtgctgagggcgtgttggacgggtgcttccctcagtctcgctgcgcgagccagctcccctcgggtgaggggagctgtcgctgtaggcgactgaagggagtttcgcggaagaaatgataaccgacggtaaaaatttaccgtgtctcaggtgaggcggtactctagagacttatggtcggaatgattaagaaagaagatgtcgagaaggtgcgcgccgccgcggacctgtatgacattgtatctgcgaccgtaacgcttaagccctccggcaccggcaccttcgtaggcctgtgcccgttccacgacgagaaaaccggcagcttcaacgtgcgcccctcactcggcgtgtggcactgcttcggctgcggtttgggcggcgacgtattcaaatacgtcgaacaatccgaaaacatcgacttccgcgaagccgtggaactgctcgccgacaagtaccatatcgaactgcactacgagaacagcggcaacgggccgaaccgcgaaaacgccggctccaagcgcacccgactgctggaagcctgcgaggaagcccaacgcttcttcgtctcccagatcctgaccaaggaagcactgcccgcccgcaagctgctcggaggccgcaacttctcccaagctgattgcgaacgtttcggctgcggctacgcgccgcaaggctgggataatctcgtgcgccacttggcctccaaggggtttacgcagaaggaaatcctcgacgcgggcttggcccgtcaaggccagcgcggcatctatgactatttccgcggccgagtgacctggcccatccgcgattcgaccggccgcacgctcggcttcggcgcgcgcaagctgtatgaggacgaccagatcgccgccaaatacatcaacacgccggatacgcagctctaccgcaaaacccaggtgctttacggcatcgatttggccaaatccgccatcgtcaagaagcggcaggtggtgatcgtcgaaggctatacggacgtgatggccatgcacttggccggcatcgacaccgccatcgccacgtgcggcacggcgttcggcgccgagcacgccaagattgtgcgccgcctgatcgccgacgattcgctgggtgcggtccagctggtcgggccgttgaaggtcaaggaccagccgttgagctcgcgcatcgtgttcacgttcgatggtgacgccgccggccagaaagccgcgctgcacgcttttggcctcgattcggccttcctctcccaaaccttcgtggccgtggccgacgacaatctcgacccgtgcgacctgcgcatcgagcgaggcaacgaggcagtgcgctcgctgatcgcccgggccaaaccgttgtatgatttcgtgatcgacgccgccatcagccggttcgatctgacctacacgcccggccaagtgggtgcgatgaaagccgtggccccgctggtggcgcagattcgcgaccgctccctgtgggacgcttacgtgcgcaagtccgcgggccgtatcggcgtggaccttgaggtgatgcgccgcgaggtgatgaacgcacgccggcagatgcatgtacgcgatgaggacgcctacgcgcccaaacgtcgattcgagcgtgacgagccgcgtgtggaacccggcaccaacccgtacgccaatccggccacgcgcaaggccttggagcgccgtgacgccgccgaacaggcatatttcaagattgacgacgccgtattcatcgccgaacagcagttcatggccgtgctgattcaggtgccgcgcgccatcgaccgcaccatgttcgggcagctgaccatcgaccatttcatgacttcggtgttccgcaccctgttccaggcgattgcggccgccggcggactgccatccgacgataccccgcaggggctgtggatgcacaacctcaccaaggccggcgggccgatgctcaatcaggtgatcaacgagctggctgtcatgcctctgcctctgcctggcgacgacagtggcaacggtgcgcagcctctgcagtcgaacgcgcccggcggtgctgccgccgtgcagctgcgccctgccgcgccggaagagcagcgctatgccaccgagctcctcacccgactactggacatgggcttcatgcgccagatcggcttggccaaacgccgcatggcccaactgcccgacggcgaagagaagataaccctccttggccaaatcacccgtatggagactgctcgcaaagatctccaagcccaaatctatggcaacaccgttggctaataatctctccctctgacgagggaggttactggccgcagtcgggcggggcgagagaagcgacgtcagatatatcgcgcagcatcgatgtcacatcaactattcgtttgatattaaacttgatatagaaaatccgattatccgcataaatacagcatttaagggctgttcatcacttgaaaaaataagtgttttaccacgaatttaccataattgaatatgagtcttgatatgacgaaatataaagggagattgcacgtataataaaaccgcgtatctccctttaacaaactatctaaagttttctacatttataactctggaaaaacaatcgcacaaattcatgttgtgagtgaccatgattatagtaatgcccttttcatttaattctttcaaaagtttcatcactatcaattcgttctctttatcaagtccagaagttggttcatcagctaatataatctgacttccttgcaaaatcaatttaataattgcaattcgctgttgctctccaccgcttaactgatatacttttttgttaagcatgtcacttagctcaaattgctttaaatacttattgattagtttcagtttttcttctttttttacttttttatattcaagagctaattttaaattccacaacacgctttcatcttctattagtccataattttgaaatagatagcctattgtatatcttctcaaaatcatagcatttttaccgttcatggacaaatttttatgactatcaatagtgattgttccctcggatatatcagtaatcaatcctattatatttaaaagtgtcgttttacctgccccgcttttccctacaagccccacaaattcgcctttttctatttctaaagataaattttcaaatagaacctgatttttcccatattcttttttgacgttctttaatgtaatcaatgacatacttatgcccccttttcaatctcatataaagcgtttgagatataaattctataaagcaattcgcagaatatgtagtcaataagtataatcgcaaaaaggcaagcaaaataataatttatagcagttaatacgcctgatataattatttcgattccccaaaaaatataccgatttttcagtgtcctaaaatgagagaatcctaaaatctcttttgccgcatatctctttcgatttacaaaaatgtccacataatttgaaatatacaaaataaacagtaaagacactataaagacaatcgtaaacatagtgagtgttttaagaacgaatgtcacattttcaagttgcattaaataaggtgtaagtaatgttccagctgtaactaattgctctaaatcatattctgataacaaagaagaaaaatcttctcttgactccatttgaaaaaataaacaccttgtatttaaagaatccaaatagtaaagtcctgcaaaattgcccgtatcaacaatgataataggattagccatatccgaaaaaccattttctgtattgacttttatcgtagaatcatcgtctatataaacaacattaaatttatcaatagttttttcttctcccggtattccataaaattgattgtaattcatcaatcggaaatattcttgcttaatatattcgctaatagaattttcatcattcttatatttatgtggaactaatactgttggttcactaaatatatcttctcccaatggttttccactgagctggatatttgaaaaatcattcagataatttctatttgcaataacaagctgttgttcataataggggcgtgatgtctgcaaaccaccgtctgtcctaaaatcacatagtagtgaatggttatgattatacatctctaatgtttgttcagaatatttttctaatatgtctgtgtttgctaacgcataatcatactccgatgaattaaaaccattagcggtataatatccgtccagatacttataatctaaaacagcttgttggctttgtctaaatgagttcccctgattcagcaatgaaataatagtgatagcgattattaccgaaaaaattatttttatagcctgaactacaatatttgtgccgctatttaaagtcttattttttatcattgcctctaaagaaacaaacttaattaaaatacttgtaattaaaacacaaagtatatttatagctaaaacaccaataaagaacagtacacttgttgctaaataagaaaaatcatatctgtttgttaatgcgtaatataaatttagcaagaacagtaatactaaacatattacagcaaaatattttattacactggtaatttgctcctttaaaatatgtatagtagaaaagcccatgctttttttaatacctatttttttcaaactataagacgtataaatacagtatatgatttgaagtacaataaataagattacaaaattcagaagattcaattctaataccatactatacggaatagcgtcattttcaaagttatttattgcgacggacagttgagaagctatctctttaattgcgttagctggtaaatctgtatagaatacaccaacactatctaaaaaatcttccttttgcaattcatgatattgaaacaaaatagaggaagatataggctgtttttgtgtaaactcatttaatggatagcaatataaatcataaacagatttatctgtggaagtgagcgtattgttaatgagttctaatttattttgagaatattcttctgtaaatattgtataaaatttgtcgagaatttctggcgatgtttcttctaaaacatacccttttaaattctcagtagcaatgttattcttttcataaatgttgtaaatagaagtattaaaaatatatgcaaagagtatgacttcaaggaaaataaaaatctttaaaaattttttcataacatacgcccctttctttgaagaaatgtataaaatagggcgggacaaatagccccgccctaggtgtttgaactattttacttaatatggataataatcataataagatgtttcgttcgcccaccaaactctctttgcatctttgtaagcgtagtttgacttgaatccactggtatatgtatctccgccgacctttacagttgcctttaccatgtagttgcgactaatacctgctttacgcccaatttcggaatatacaatggtgtctgtttgccctccattgtagtacaaatctccacccgctacatcaatagcccacgctgtaagtggagcgccgacaaccataactgctgctacaagaccaactactttcgttctcaacttctttgctctcattcgataaacctcctttctcttttttactttttgatagttttatgtcacgtactgtttttgctaacctcaacataacatatatttcattaaatgtcaagttatttttgtttctattttatatatgacctctttgttgctatcatattttgtgcataatgcacaaaatcaaagtaccaatattagtgctttccacgattgtacttttacaatgaaaagacgaagtacctgtgataaattcattgctctaaaattattagagaaactatacaatatagctatccttttttctcttgtctgccataaacagaaaagaaaaagccctgtcaagagcctgccacttctttagaagtggtgcttgcactcttgatctgggctttttgtttgctgtatctttcacgcaagaggaaaaaggctactcgtccccgttgtcaaaatcactgatttttaatacttcccgtaacagctccatatcctcttttgagtttgggtttatcttctttacaacctgataaggcgtaccgtacttatgtccctctgtgctttccccgaacatatccatgctgtataaatcatcatagcggtttaatactttctgaaatttcaagtgctggataaattccttgatagggtaaaggtcggacgcttgtatgtctgttccgctgatatagtctgtgatatatttccgcaactgttccagctcatattccagccattcttcctcgctgtcaaagaagttatcatagtgtccatgtttcaactctgcgtttaggcgttcttccgtccttaaaaactggcatacctccttttccgcctgttggacaaacttccattcccccgacaacaattcattgggcgttactcccagtacgtccattatcttttccagcgtgtcaaaggtcggatagtttacccctcgttcaatcttggaaaggctctgcatattgataccgatggcgtccgcaagctcctgctgtttcattttcctgtgttttcttatggtctgtatgttctcccctaaaaaatttattttctttgtatcatgctccataacttcttatatcttctcctttcccggctttttcgttcctttataagcctatcatacttattatagacgaaaaagtcaagaaaaagttcttgacaagtaattctaaaggcgttattatcatagcagatatagtgattaagcacaatgaggttaatcacacgcttgagtaagcatagaaaagagttgttttcgctttgatagcatgaataggcatggactatccgaccgaaaactgtgtttcttcctgtgcctgccccgtttagccacgagcctcccaaaggctcgtgagcgttaagaacggggctggtgcaggaagaaaagggaacgccgcaggcgttccgtacagggcgtatatgtaacaccgccctgcgcatacatgtcatagtacctagaaactgtgataaataaaggacaaaacgctatttttaccccgcaaaaaacggggcatacgaaaggagtaatgcactataactacacacaaaaatttatccgttaagattgattacatcagcattgtatttgaaacggcaaccgctgaagatgtaatcatgcacattttaggtttaccgactgatattttcaatgtctatccggcaagcattaaatacaaaacctatcaagcacgctggcagattggagatatttatgtatcgggggacgcaagaaagacagaggacaacccacaggggctaggctgttatcttgttatgactggcagaggttgtgatgatattttccgtattctcgacagtaggaattatacctttggggatatgttccgacgctgtgagcgaagatacggactggataattttcatttcacaagacttgatattgccattgatgataagaacgaaaagccattctttaccatagagcagataaagaagaaatgcgaaaaagaggaatttatctccaatagtgagggctaccactttgatgaaagcaagtttgacgatttcgacaccgcaaagactgtttatatcggtgctggaaaatctggattatcctaccgcttttatgataaggataaggaagtctgttcaaaacataataagacgcttgaggaagtcggcagttggaaacgaacagaaatgcaactgcgtgatgataaggctcatgtttttgccatgacatttaaggacagaccgctggaacttggggaactggctttcgggctactggcaaacaacctacgctttgtcgtgccaaacagaaacgaaagtaataaaagcaggtggaaaacgtgtcgattttgggaacgctttttaggggctgtggaagtcttgaaactgcaagtaccaaagcagcataattcccttgaagaaacacagcaatggctcacagagggtggcgtcatttccgctgtcaaaagtttttatttcttggaagaacatgacgcattaggtggactggaaaaagtaggaactatgcttgataaggcaagatacagcaattccctttccagtaaattaaccgcccatttacagaggataaaccgcaccgaccttatcccctatatccagtatgacacaaaacatgggaaagggggtatctgatgaataacaacgatattcccgtatgggaaaaatacacccttaccattgaagaagcgtcaaagtatttccgcattggagaaaacaagttaagacgattggcagaggaaaacaaggacgctggctggctcattatgaatggcaaccgcatacagattaaacgccgacagtttgaacaggtcattgacaaattggacgcaatctaatgcaaatgagccttgtatgtgttatgatgaacacaagtcatatcaaggctctttccaacaaggaaaggagcagacaccatgaaagaaaaaagacgggatagcaaaggtcgtatcctgcatactggagagagccaacgaacagacggaaaatacttatataaatatgtagacgcatttggaaacacaaaatatgtgtatgcttggagattgacacccacagacccgacaccaaagggaaaacgggaaaaaccctcacttcgagaactggaacagcagataagacgggatattgaggacggtatcgacagcacaggcaagaaaatgacgctttgccaactctatgccaaacagaacgcacagagggcaaatgtgaagaaaagcacaatgaaacaacgggaacaactcatgcggttattgaaagaggacaagttgggtgctaggagcattgatacaatcaagccctctgacgctaaagaatgggcggtacgcatgaaagacaaaggcttttcctacaataccattaacaaccataaacgctcgttaaaagcgtcattctatatcgccatacaagacgattgcgtaaggaaaaatccctttgatttcaagttaagtgaagtcctagaaaatgataccaaagagaaagttgcattgacagaggaacaggaacaagccttactctcattcatcaagacggacaatgtgtatcacaagtattatgatgatgtgctgatactgttaaaaacaggacttcgtatctcggaactgtgcggactgacagtagccgatattgatttcaagaatgaagttgtgattatcgaccaccagttactaaagagcaaggaacaaggctattatattgaaacgcctaagacgaaaagcggaataaggcaagtaccattaagcagagaaacgatacaggcatttcaacgggttatgaagaaacgcccaaaggcagaaccatttgtgatagacggacggggcaatttcctatttgtcaatcataaggacaagccaaaagttgcgattgattacaacgccttatttgtccgtatggtaaagaaatacaacaagcaccacaaagacaatcccttgccacatatcacaccgcatacgctacgccatacgttctgcacaaggctggcaagcaagaacatgaacccaaaagatttacagtatatcatggggcattcaaacattagtatcacaatgaattggtacgctcatgcgtccatagataccgcaaaatcagaggttcagcgtctaattgcatagaagtatttaccacgattttaaccacgtttgatagagaaaatataagaagatagacctagatatgtgaggtttaccacaaaagcaaaatgcccgtagagccgataaaataaggctttgcggacatttaagaagatataaaaagatagtcaaaaacacatatataatttttaataactttttaatgacaaacgataaattatggtataatgcaagtatgaattgcttggtttgcgcaatgaagcggaggctcaatcatggcaacgacaaagaaactatccttcggtttggataaggccggtggcgcggccttgatcctggcccgcatcggtgccgcgctcctatggatcatcgcagcgctcgcggccgtggtatgggtggtattcctcatttccccgcgctcgttcgccgcgaacttcggcagtgtcgacctgaatgtcggcggcgcgttcaccctcagcatcaagggcgacttgttggactactcctataatctgcagaacttccacgacggtcccgtcaacatggtagctaccatctccaccggtctggcgagaatggtggtctacgctctactggccttggcgttctccgaaatggccgcactgtgcaaggatttgacggtgtggcttgcagacggcagggatgccacgcctttccaaggcatggtgtccgaccggttgaacagggctggctggtatctgattgtcgcgccgattgtgggtctggtgaacttcatcgtatgtttcctggctggcacgggcggcaactggggcttatggatgagcggcatgatggtgatgattggcattatcctgttgctgattgcgcgcatcttcgattatggcatgggtctgcaacgggaagtcgacggtctgctgtgagggggaagagcgccgtagacccgcgtggcgccggtccgaacagggccggtccgaacaccgagggcccgaatgaggacagcctgaacatcgttgattcgagcgagaccggcctgaatgcggctgactcaaactccaccggtccggccggcataggccatatcgtcctgcgcctcgaccgcatcatggtcgagcgaggccgctcactcaactggctggccgatcaggtgggcatcaccaacgtgaacctttccaaaatcaaaaacaatcgcgtttccgccatccgcttttccaccctcgccgtcatctgtgcggcattggattgccagcccggcgacattcttgaatatgtggatggcatttcgggcgatgcggacgatgcgaatagcaagtaatcgcacgcatgccaactcttctcctcctggcctgtgattgattgacaatcagggattacatgccaaatgggagagataaacgtgtggaggttggattggatgggtgcagaagttgcggattggccccatccaaattggactggtttgggtgggccaatccaatccgttcaataatgaagcgcgataccaagcagcgtcgaaacgaagggaaactcatgacgcagaatcgtgcggaactcaaccgtaatctggcccagatgctcaagggtggcgtgatcatggacgtcaccacgcccgaacaggcgaaaatcgcgcaggatgccggcgcatgcgcggtgatggcgctggagcgcatccccgctgacattcgtgccgccggcggcgtctcccgtatgagcgatccggccatgatcaagggcattcaggaagctgtctccattccggtcatggccaaggtgcgtatcggccacatcgccgaggcccgcattctgcaggccatcgaaatcgactacatcgacgaatccgaagtgctttccccggccgacgacgtgtaccacatcgacaagaaccagttcgacgtgccgttcgtgtgcggcgcgaagaacctgggcgaggcactgcgccgcatcgccgagggtgctgccatgattcgtaccaagggcgagcccggcaccggcgacgtgattcaggccgtgcgccacatgcgcaccatgaacaagcagattcgcgaactcgtcggcctgcgcgacgacgaggtctacgaggccgccaagcagctggccgtgccctacgatctggccaagtacgtgcacgacaacggccgtctgcccgtcgtgaacttcgccgccggtggcgtggccaccccggccgacgccgccctgatgatggagcttggtgccgaaggcgtgttcgtgggctccggcatcttcaagtccggcgacccggccaagcgcgccgccgccatcgtcaaggccactgccaactggcaggacgccgatctgctcgccaagctgtccgaaaacctcggcgaagccatggtcggcatcaatgaggacgagattcagaccatcatggccgctcgcggcgagtgagtgcattaccttggctcccctctttgaggggagccaggaaagggtgacgctcccgccagcgggagtcaaggcccaaggagacaacatggttgtagctgttgaatatatttccaaagaagaatccgcggacgccaaaaacgccaagcacggcgtgaccggcatcctggccgtacaaggcgcattcgccgaacatgcggcggtgctggacaagctcggtgcgccgtggaaactgctgcgcgcagccgaggatttcgatgaatccatcgaccgcgtgattctgcccggcggcgaatccactacacagggcaagctcctgcattcgaccggactgttcgagccgatcgccgcccacatcaaggcaggcaaaccggtgtttggcacttgcgccggcatgattctgctggctaaaaagctcgacaatgacgacaacgtctactttggcgcgctcgacgccgtcgtacgccgcaacgcctatggtcgtcagctcggtagtttccaggctactgccgattttggtgcagcggatgatccgcagcgtatcacggacttcccactggtattcatccgcggaccgtacgtggtgtcggtcggacccgaagccacggtcgaaaccgaagtcgatggccacgtggtgggcttgcgtcaaggcaatatcctggccaccgccttccacccggaactcacggacgatacccgcatccacgagctcttcctgtcgctgtagtcgattcgtctgccgttagactggtatccgattgacgaatcaaggagacgatctgccatgcagcttgagctgaatcgacgcagcaaggtgccgatgtaccggcagctggccgccgagctgcgtgaacagatcgtctccggcgcgatggccgagggctaccgcctgcctcccgaacgcgagctgtcctcacgtctcgaagtcaatcgcaccacggtgttgcaggcgtatcagcagctcaaggacgaaggtcttatcgcctccaaagtcggcaaaggcacgttcgtgctgccggctgcctccgcaagccgaacatcgcacacgtcaaacagtgacttcgggaatgcaataacgcgaacaacacgatcgtcggcagaaatgggaacatcgcaagcctcctcttccggcgacgtagaacgtgctacctccactgatttcttgacgacagaccagggcagcagctctgcggcggtccatacgattcgtgaaagccgttcggttcagggcccggaaccaaccgtcgtgcgtccgccatggtcggtgttgttctctgattattccaaccggtttacctaccatgacatcgcctcggccgagcgggcgcagcgcggcgacaccattattgacttcgccaccggttcgccgaacccggcggatatcccggacgatctgctgcgcaaggtcagcatcgaagcattcgaatcgcgggaattcgacggccaaccggaatcacctatcgagggattcgaagagttgcgtgcgctgcttgccgaacatatgcgcgcacgaggcgtacaatgcggcgtccgcaacgtgatggtgctctccggctccgagcagggcattgacctcatcgtgcgcgcgttcatcaaccccggcgactgcgtgctggtcgaacaatccacgttcttcccggcattgcagaccttccgttcggcggatgcgcgcatcatcggcgttccagtggacgagcacggtatgcgtacagacctgttggatgggtattgcgcgcgattccggcccaagctcatttacaccgtcccgacgttccaaaaccctaccggtaccacgctgtcgcccgaacgacgcagcgaactcattgacgtggcgcggcgctatcagtgtctgatcgtggaagacgatgcttacggcgatttgtggtacggcggggaatcgtccgacgcacatcgccccataccgcttaagggcatggagaatgcgggatacgtgatgtatttgtcgacgttctcgaaaaccgtcacttcgggcctgcgcacgggatgggttgtggccgacccgcatgtgattaaccggctggcggctctgcggcgcatggtcgaccagcatacgagcacgtcatcgcagcgcatctgcctggaactgcttaaagaaggccgcgtcgccgaacatttgcgcggtttgattaaggcttaccgcattcgacgagatgcagcaatcgcagcattggagcggtatgcgccggatgaagtgtattggaccgtgcctgcaggcggctactatatttgggtttccttaccggacggcgtgcgctctctggatgtattggaatcctgccgttcccaaggcgtcacgttcatgccgggcagcgtgttcgacgttgacgaaatggatgattcccacatccgtctcaactttgtgcgcccggatgctgctgacattgataccggcattcgaatcattggcgagacgatagcacagatgtagccaagtgactggctcattgcggttgtcgagtttttttgatggctgcatacccacatcgatgggtgcattcgacgaatgaataagcgaggaagccatcatcagttcgctgtggcatgcgcatagcgttgtcgggcgaacggggcagaccacgtggtcgttgcgtgacctggccgatcgagccggcatcgcattgcccctggcgtagtggcgaggtggcgcagtaacgagtcacgccatcgcgagccgatgatgcgaaatgcggaaccggtcgcggccatcaacggctatcatacatgcggaagcaacgatacgttggcgtcagcacatccatctgactccagaaagggacacgatatgaccacatcctccgtttcgccggtgaccactgaactggcgggcagcgaaaccggcatcacgcttgtcattcacgccggagcgggcagtcgtggcaagcacagcacgcctgaacgcatcgcccaggtcgaacttgatctgcagcgcgccctcgatgccggataccagttgttggaatccggagcaccggcgcatgaggctgtggtcgccgccatccacgtcatggaagacgctcccgaattcaacgccggccgtggtgccgccctgaccagcgatggcatcgcccagatggacgcctgcctgatgaccggcgatggcgaggtcggtgcggtcaccggcgtaagcaccgtgaagaacccgatcgatgcggcgcgtgccgtcaaagagcagaccaagcatgtgctgttcgcggacccgaccgatgccgagatcgccgattggggcgtcgcgaccgaaagcaacgagtacttcatcaccgaacagcgtcgtcagtccttggccgaggctcagtccggtggcgatgagtgggagaagcatggcaccatcggtgccgtggcgcgcgatgccgagggcaatatcgccgctggcacgtccactggcggcatcaccaaccagatgcacggtcgtgtgggtgattcgccgctgcctggttgcggcacgttcgccaaccagtccacggtggcggtgtcctgcaccggcatcggcgaggcgttcatcaaggtggtcgccgcccatcaggtgtcggatcgtgtgcgtttctccggcgagaacgtcgaggatgccgcgacggccactttggacgaagtcgccgcgcatcatggcgatggcggcatgatcgttctgccggcggtcggccgtggcgtggtcgcctacaacagcgagatgatgaacttcggataccgtagcgcgcaaggaggtaaggtgcagggctgattgccccctgtattgcggcatatatcataatggccggtgtgctgcggattcttggtaaggaatccgcagcacaccggccattcatgtatgcggcaagtgccgccgatcagtgcggcagtgcgcgctacttggtgatcgtgttgtacgtgggcatgttcgtgtaatcgaactgcacgttcttcacgttctgtgcagacacggcggcgaaacgtttgaccgggaatactggggtaatacgcaacttcatcgctcctcttcctcgaatgaaactatgttccattggtatgagccagccacgtacggtattcgtgtctggcctgccacacaatgatgcagccgtatatacgggcacagcattgcgcggcagttcattgtatggaagacatgcaaactcaatgtttccttgtccaaataaaaaaacgagcgcggctgatgtgcggcaccggtccaaaaactcatgtccgccagcgcaacgcgactacgtaccttatgctggtctgcgcgtaaaatagaatggttgcgatattgggttattcacggaggaatggatgcgacgctggctgatcaatgtagccaaaaatgagacgattctcatcgtcgccgcaatactcgccctgatttcgtgtttcattgtgccgccggacgccgattacaaaagctacattcacgccagcaccatcagccagctcatctgcctgatgattgtggtgtgcggattccagcgtatcggcgtgttccgcatcatcggttcgcgattgctggagaaggtcagcaccatgcgcggactggtcattacgcttgtcgctttgacgttcttttccgcgatgttcatcaccaatgacgttgcgctggtcacgtttgtgccgttcgcggtggccgtgctcatcatggctgggcaagaggataagaccatcctcgtggtcacgctgatgaccattggcgcgaacgtgggcagtatgctcaccccgatcggcaacgcgcacaacctgtatctcaaagccctgaccggcatgccgaccatggaattcctcggcatcatggcaccgtattccggcacggcggccgtgttgctggtcatcgtgatttccgtggtgtttggcggcaaaccggtcggcgacctgggcgacctcgaaaccggcgtgctggctcccgagcgcaacaaacaccagcccgacgagattcgtatcaccggctacggcgccggttatggcggctggcgcaccatcgtctactcgctgctgttcatcgtctgcctactggccgtctccgacgtgattcccctgtgggtgatgtgcgtgatcgtggtcgtcgtgttcctgttcaccgatcggcgcgtattcaaatacgtggattggggactgccgctcaccttctgcatgttcttcatcttcatcggcaacatgaagcgcgtgcccgaattctacgaactggcgcgctcgctggtcggcggccatccgctggaggtggcggtcggctccagccaggtcatcagcaatgtgcccaccacgattctgctttccggcttctgcgaccaatggcgcgatctgatcattggcaccaatttgggcggcatgggtacgctcatcgcctcgatggcctcgcttatttcttacaagaacgtcgtgcgccaatacccgcacaagaaaggccggtatctggccgtctactccgccgtcaacgttctgtttttggccgtattgctgaccttgagctggatcatcgagccgagtctctgagccgccgttgtgggttgggccggtctaccgcgcgtatacggtgggggagccggtcagtcggctcatggccgactgcgggatgtcgtggatgcggccgatggtggcatccagcgtggatacgccggatacgccgtctgtgttggctgtgttggctgcagaggtgatgctggatacgccgactgcggacgatgatacggccgcaaccatcggctgacgataggcgttggagttgcgggccagccgggcgagcgcagggcgctgcctgcggaacagattgataaacataccgcatactccttcatcgttggccggcggtcttctggccgccgtggtttccatcctgccctcccgtgcttgtattcgctatgggggatagcccctattattccctgaatctgcacgattccccctcatccttgagggtgattctaacggcaaaggaatcggcctaatggccgatgtcgatcagcgcgaagccaccagcgtgacgctgtacggcttgatcttcatcgccagcaatgaagacggcgacggcaatgtgtaagcccgacgttccggcacaatcgcccccgaagcctcgccgcggtatccgatagtggttttcgccgtcggactggcgcttaacgtcgtcacctccaaacgcaccggtcgcgatggcgaggcgcccagcccggccagtccgcgcgcgatttccaacgtcacatccaccggggaatcggaggtattgacgattttgatgtaacggcaggcgtcatccccgtcatgcccggtggcactgacatacagatgtttggcggggcgtgacgcggtctgctcgatggacacggcatatgtcgtgtcgcccagatgcgtggaaaacagccgctccacctcataattcaccgtggggttcacatgcgccggattgaattcgataagattctgcgcccaccccttagccggaatatgcgcgagcagcggcgcataggaggtcatgcgcaccacgtcggaattgcgctcgcagccggtcaggaacgcggcctcgccgagtgccgacttccacgtgttcgcgccttgttcggtctgtggttggccggcaaaatagccgttggctgaatattcgccgaaatagacgccggcgccacaacgcgggtaagcgtcgaatcgtgacgcctgggatgcaaaccattcgggggagtggtaggaatgctcgtcgacgataatcgcgtcaccggtggcggaatcatgtgccccggaatcggttgcggccaacgctcgcgcatggtcccagctgcgcttcatcgccggctggaaggggaacagtccggcgctcatcacacacagcatatccgggtatcgttcatgaatggcctcgctgatcatgtcaaacttggccacgtagtcagccccgaagttttcgttgcccacgccgatcatgtccaagccgaacggctcaggatggcccatatcacgccggaccgcggcccacgagctggactccggatcgccattcgcgaattcgatgaggtccaggtagtcctgaatcacattgttgcggaaggtggccgaattgatatccatgtggcgcggatctcggccgggcgactggcatgcgatgccggcgaacagagtgggcagcggcttggccttgaggtcctcgcacaggcagaaatactcgtagaagccgatctgatagctctgcgaatagctggaaccatccggcatcttgaacgaccacatcgaatactgttggcgtcgcgcggccagggagccgacggtatccttccagcgatattcattgccgggcgtcacaccttcgacgatgcagccgccggggaatcgcagaaacgctggatgcaacgcctgaatggtctccaccaaatcgcggcgcagcttgccgtaacgccatttcgggtcgcccgcgccccaatagtccgcatccatgaactgcaccagatccagatcgaacgtggtgcgttcgccggcgtcaatggtgatacgcagcttgccgtaatcggtgttcagtccggttacgtcggcgttgaaccggtaccagccgtcacggccgatgacgatggcaccatccgacgaatccggactgatcgaaacgccggaatcctgcgcatcggccccatcgtcctgcctcagaccggtctcttccgtatcgtcaagcggatcggagtccacgatatacgacaatcgagtgatactggtgagcggcaggccgtacctatcgaccacgccgacggacagctcggcccgcccatgaaccggacgtaccgcgagactgacggaataggtgtggtcggcgacgatggagaacgcgggctcgcccccgttgtcgccgcctccgttatagccgaggttttccagatatgcagggccggtttcggaaggaacatcggacgtgatgcgagcgtatcggctatgtgcgtgaattggcggggcggggcagtcggtggtcacccgctggccgtgaatcccgcgtatctcactgccgaggctggcggcggaacagttgatgaaatcccagaaacgcagggaatcggcctgcgtacgccaccgttcggcaccggccatacgccacgtgtgatggtcgagatagacgccgtcaaaactgtagttgttcaccatgttggcgttcagcccgccatccgcaccatggttgatgtcctcgaagaacacgccgtacagtcgcccgcttgtgtgatgggtggggcttcccacgctaatccgcaccatggtttcgattgtagagggaatggagcggaaaggtaaacggaagagttcgctcaccgttcatgttgcggtcaatccaagtcgactgttcgccggtatacagccggtaacctcgaaacaggaatggaaaatacggacgactaggagcgcggctgtgcaatcctcggtgggaatacgtgagcgcatcgaccacgtgtatccgtcgctgcgtccggcggagcgcgccgtggcccagtatattcggaatcatatcgaggaggcggccgacctgaccgtcggtcagatggccgacatcgcccacgtcagccagccgacggtgattcggttcgcccgcaagctcggcttcggcggttaccgtgaactgcggtacgtgttgcgcaacccggccgccgaacacaaagtgaccttcaatccgttggccggattcgatctgaatccgtgggatggcgaagatgagattcccggtaaagcggcctatggcgcgaaggcgctgatcgacgagctgcacagtgcgttggaccccaaggcctatcgcaaggcggtcgccctactcgccgaatcggagttcatcgacattttcggcgtggagaattcgttgacaccggcgatggatctgttcaccaagctcggctacctgggactgacatgccgtctcaataccgacgcttacctgcagcagatcggtgccgggcacctgccccacggcgctgtggccgtcgccttctcccattcgggcagttcggcggatacggtcaaagcgttgcgattggcgaagtcgcatggcgcgaaaaccatcgccataaccaatgccatcggcgcgccgctggccagctgggccgacgtgacgttgctgacgggtcgtgactcgcacacgatctatggcaatgcgattttctcgcgcgtggccgataccgcgctcgtagacatgctgtgcatgggcgtgattctgtccgactatggccggttctccaccgcgctcgacgaatccggtcgcatgattcgcgaccgcgtattcgagaactgagctgctgctttatcgcgccttgggccgtattgctctggtcgttgctgcttgagttgttgacgatttggtcgttgtcgccctggtcgctaccgtcctgaggcatgtgccagcgaatacgtagtggacttggcgtgcgtatgacgttcgatcttgccgctcaactccagctggtccaagagctgcgtcatctgatccttgttcaggccaagcgctttctgcatggttttacggctgagcttcacaccgcggaacgcgaggaaattgagcgtgaactgttccaacgtttgaggcgacggttccagcgttgccgtatcaagcgggcgggtactggcctgatcgtcaccgtccgggcgttcgccgaatccactgccgagaatcagcgtctgcagtggcgcgcagccgatgatgcgtgcgccggccaaagcatctgcggcgttatccgtcatgcgctgaatcgtggggaatgagtacattttggcatgctgcgcttcgtcagtggtgctgggcgcggcggaagcatcggcatcggtccgatgcgaggacgcggcctcggccgataccgggatgggcagtaccattgccaccgaagtggggcccacgcgcagttgcggactgaccgcgctctgcgcgtaggcgtccataatgcgttgaatgccggtaccgcagttctcgcagaggcccaaatcggcgaacaattcagccaaacgcggggtgcgtggctggcatacgccgttgagtagatcgttgatttccaaaccatcggtcaggccgccgagcgacacgatttccaagcgggaatcgaagatattgatcagtgtggggccggagtacgtgtaatcgcgatgttccagtgcgttgaccaatgcttcgcgcagggctatggccgggtattggccggattcgttgatgccgttcagtagggcgctggcttggtcgagctggcgcagcaccgagccggtgaatgtgtgacgttcgcgaatggtgtttttgccattgccctcgaaaatggtggccttgataacgaacgggcattggttggacagcagggtggcaagcgacgattcggtggtgctggtgaaggtgttgttggtgccggtgttggtgatgctgccggcgggggcattaccggcatcggcagagacggatgcagccatgttggtcacaaccgggctttcccaatccctgccttcactggcaaaacgaccctgtgcgtatgtgaaagtgagctcaccgctatcgcctgcgacggtctggcccgatgcggcgtgatctacgttgctctccgttgtccccatatcgccgatggtaccggtgcaagccgacgttacgccgaggtgttttacacccctacggctagacttacacgagtttggccccgtagctcagttggatagagcatgtgacttctaatctcaaggtcgacggttcgagcccgtccggggtcacgatgtaataagcccttggtccctcatcgtttgtgaggggcaggggcttttgaatattatgccggtctgggtccgtctggagcctgaactgtcgaccttgagattagaagtcacatgctcatcatcaccatccgggaacacccttaaggggtgcgtctcctgcataacggctatacactgacttgagatgtgctgaataataaccagctatcgcacgtccgccaatggcgacgaacgagggaagaaggcccgtgccacgagcaatcatcgaggtaagaaacctacgcaaggaataccccgtcgaggatgagacggtggtggcgcttgaccgtgtcaatctcagtatcccgcaaggccagatctgctgcattttcggcgaatccggctccggcaaatccacgctgctcaaccagttggccggcatggaaaaaccgacgcgcggcggcgtgagaatcggcggagtatccgtcagcaaactcgacgagcgtgagctggcggccttccgccagaagcatctcggcttcgtattccagtcgtacaatctgctgcccaatctgaccgcgctcgaaaacgtggcaatgccgctgatgttccgcggcgtgcccaaggaacagcgcgaacgtgcggcgcgtggcgtactcaaacgagtcgggctcggccatcgtctcagccattacccgcgccagatgtcgggaggccaacagcagcgcgtcggcatcgcccgggcgtttgtgaccaagcccgaggtggtgttcgccgatgagccgaccggcaaccttgactctaaaaccaaaaccgaggtcatgacgatgatctgcgcattcgcccatgacttcaaccagaccatcgtgctggtcacacacgatccgcagatggcttcatacgccgaccgcatcgtcaccttgctcgatggccgcatcaccagcgatcggctcaacaccgacctttcccgcccaactgttccgtccacgccgtccgccccacccccctcccgtccacgccgtccgcccatagaacccaaggaactgaccgatgaagcacctctcccaccacaccatcgccatcatcgtcgcgttgctctccacgctgtcactggcacttgccgtcatctcccttccgcatcaggcgtacgcggtcgacggcacagacggcacaagcggcacgaacagtacgtctcagggaagcgacggcgattccgcgccgatcgccggcccggtgccgaacatcatcgtcaccaacttcacctatggcggcgattccgtggccgccggcgccgatttcaacctcgacttcaccttccagaacatgggtcaggtggcggtgacgaacatggtcatcaccgtggacggcggcgagagcttcgccatcgcgggaggcacgaacacgttctacgtcgacgcgctgtggggcggttacgccatgacgcaaagcgtgccgatgcaggcgctcgcctccgcgaaaagcggtgcccagcccgtgaccgtgaacttccgatacgagtatgtggacgccagcgcccgctcctcaagccagtccgatgtcaagatttccgtgccgatcagtcagcctgaccggttcgaaatcagtgatcccgtagtgcccgaccaggtgatcgccggtcaggaaaacacggtcacgatggaatatgtgaacaagggcaaaggcgatatcgccaacgtcgaggccacgatggagggcgaaggtttcgatgccacgatgaaaacccagtacgtgggcaatgtggcttccggcgccaccggcacgattggttacgcctttacgccgcacgcgtcaggcgagctgaagaccacgctcaaagtcacgtacgaggattccgacgggcagaccaaaaccaaggaattcccgctcgccatacccgtaaccgatatgcagccggtggatgattccgacatggccgatccgaacatggaccagagcgccaatcagggattgccggtgctggtgtatgtggtcatcgtcgtgatcgccgtggtcattatcgtggtgattgtgctgctcgtgcgtcgccggcgcaagcagaaggccaagaagaacgatattgatgaggactgggatgattggtccgaaggcaaggatgataagaccgataccgacgtgacggatggtgctgcggcagacaccgctcctattgcaccagcctcaccagcctcaccggccggcccgtcccacaaggcctgaaaggcccgaccatgcgattcggcgacatactgcggctttgcagacaaaacctatggcggcgtaaatcccgtacgattctgaccgtgctgggcgttatcgtcggctgctgctcgattgtgctcatggtctctttgggccagggcattaacgagcagaacgagaagatgctcaaatcgatgggcgatctgtccatcgtcaccgtgtacaccaacggttatgccggtccgatgggcggtggcggttcgtccgagatgggcgataccaagctcgacgacaaggccgtggaatccttccgcgcgatgagcggcgtatccggcgtgacgccgatgatgaacttcccttataacgtgacggccagagccggcgcgggcggccgttacctctacgattacgtgcagatcatgggcatcgacatgacccagttcgaccagatgggctacaagctcgtcggtggcgagaagccggtcaaaaaggatcaggtgcttgccggcgaatggttcgcctatggtttcatggacaccctgaagaacggcgaacaacgcaccagcacacgcggcggtcagtattcctcatgcacgtttgaccagaccaccggccagtgcgaggaagaccaggacgaggatccgttcttcgatccgctcgccacgcaaatcagtctgaccaccggcaccaattatcagggcgaccagtacaccatgaacatgtacggcggcggtggcggcacaggcggtgcgggtggcggtggcggcgcgggcggcgcaagcggcagcgccgcgggtcagtcggaaaacgtcaccctcgatgtgctggcttccggcattgtggcgggcgactacaacaagggctatgccacctccgacggtctggtcatggatttgcaggcgttgaaggaactggccgccaaagtcgatccagccgccgccaaaaaagccaccgcctatgatcaagtgctggtcaaggccgccgacctcaagtccgtgcccgaagtcgaatcacagatcaaagcgttgggctacgagacctcctcctatgaagacatgcgtaagtcgttggaagaacagtcgcgcgcgattcagctgattctgggcggtatcggcgcggtttcgctgttggttgcggccatcggcatcgccaacacaatggttatgtccgtaaccgagcgcacgcgcgagatcggcattatgaaggcgcttggctgctacgttcgtgacattcgcgtcatgtttcttgcggaggccggcgcgatcggattcttcggcggatcgatcggctgcgtgctgagcggactgatatcgctgggcatcaacgttgtcggcgcgttgtatgcgggcggcatgagcggcggcatgtctggcggtatggtcagcggtgccggcgggggctccggcgacggtaccggtggcggaacatctatctggaccatactctggcaggcgatagttggtggcgagaatgtgacccgttattcggtgattccgtggtggctgttcctgttcgccgtgctgttttccacgctgatcggcttgctattcggcttcggcccggccaataaagccgttaaaatcccggccctagacgccatcaaaaacaacgagtgatcgcctctgtcacctgctccaccgttagtccataacgttcgttcagttcgcccagcgacacgcggtcggtaaattccttggctgcgccgaagttcagcacacgaggattacggctgccgtccgagacatgatgattcgcatagtatgcggtcactttctcgccccagccgccttcaagctgcccgtcttcaagggtgatgacctgctggtggccatcacgcaacgactccagtacgtctgaatccagcgacgtgcactggcgcgggtcgataaccgttgccgtgatgccataatcgtcagacaatgcggcggccgtctgctccgccaacggatacgcattgcccagtccgatgatcgcgacttgcgagcccgtctgattgacccgccaatccagcatgtgacgcgcaccggcatgctgagccgttacgctaacggtcccgcggactgttgcggcagatatgcccccgctggcggagctggcggaggctggcagcgaagctgactgggggcggtcagcaatctgcccacccgtcaccggcagcagcgtcgcatcccgctccgccgccagaatcgcctcgcccggcacccgaatcaccgccggaccagcaggggcgtccgccgaaccggccggcgcggtagcccatgccaaatcagccagatagtcgcgagccgaagtcggcaccagcatcgtaacccctggaatattggagaacatcgtcacgtcatacgcgccggaatgcgtattgtccgaaccggacaagccgcccagaaaatcaagtaccgtgactcgcgaacggttcaggctcatctcctggaagaactggtcgtaggcgcgctggaagaaggacgccgtggtggccaccaccggcgtgccacccgcccgtgcgatgccggcagcgtacgccacggcatgcgattcggtgatgcccgtgtctacataatgtgcgcccgcgcgctctcggaactcatgggtgatgccgttcgagcccggcgtggcgggggagatgaccacgagtcctggctcggcggcgaaacgcggttcgagcgcggccatcgccattttgccgtaatgcttgcgcggatcgtccggcttgccgattgcggcatccggattctgccaatgcgaggcctcgcactggccttcatgtggttcatgatcggacaggttgcagtgatccgaatgccacggttcgctgtggttcacgttatcggtgggatgcacgccggtgggggagtcgaacgaaaccggtgaggccgaggcggtttgccgatctgcgtgagtctcctcaccgtcatatcctgcgcccttcagcgtatgaatatggaccaccaccggatgatcgatatcgcgcacttcctcgaaagctgcgaccagcgcggaaacatcgttgccggcctccacataccgataatccaagccaaacgcgttgaacagattcggctgggcggtgccgccggacgcgcgcaggcgggcgagcggaccgtacatgccaccgaaatcgccggcaatcgacatctcattgtcgttgaacacaatgatgagattgccgccctgctcagccgcgttgttcagtccttcaaacgccacgcccgaactcagcgaaccatcgccgatcacggcgatcacattgccgatgccgctgttcgggccttccatatcgcgggttttcgccaaaccgcaagccaatgaaatcgaggtaccggtgtgaccgagcacgaactggtcgtgtttgctttcgtccggattggtgaagccggtcacctcgctgaaacggtccgggtccagataggcggcggcgcggcccgtgagcattttatgcacgtagctttggtgggatacatcgaacacgatacggtcacgcggcgaatcgaagacgcgatgcagggccaccgtggcctccaccatgcccagattggagccgatatgaccgccgtgttggtggccatatgccagcagcgtggcgcgaatctcgcggcacagttcggcgagctcgtcgggggcaagggccttgacatcggccgggctggcaatgcggctcagcagatgggagtcgtcgccatgggaaggggtaatgctcggggggatgtcgtgaaggcgcgcggccccctcggcagcaccggagacggcgaaggaatcgcttgaatcaaatccgtttcctgacgcgttgcgcataccctcgaatctcccttcgctagtctttccgaagttgaatgctaacgcccggcattgtccgaggtccacatgacgaatcaatgcccccaacatctccgtaaatgggtgattcgttcgctgcgcgatgtgggacaatgaatgcggtaattccttttgataccaaggagcgcgcaatgaaggccgtatacgcatccaccgtcaaccatgccgatccgcttgccgcgttggcagtgggcgagcagcccgaaccccaggcccgcccgttctggtcgaccgtttcggtgcgcgcggtgaccgtaaaccatcacgacgtctggtcgctacagggtgtgggtctcgccgccgaacagacgccgatgatcctgggcaccgatgccgtgggcattctggacgaggacatccccggcaagcatgggctcaaggccggcagcgaagtggtgctgtacacgttcgtcggcaccgatggcgcgggcgtggccccgggcgagcgccgcacgatcctctccgagaaataccccggcacgatggccgagaagactgccgtgccgtccgccaacgtgttcgccaagcccgcaaacctcaccacggctgaggcggccgcactcggcaccagctggctgaccgcctactcgctgttgttcgatgccgccggcatcaagccgggcgactccgtgctcattcagggcgcgggcggcggcgtgtccactgcggccatccagctcgcccatgccgccggtctggaagtgttcgtcacctcgcgtgacgcggacaagcgcgccaaagcgctgaaacttggcgcgaacgccgcgctggagaccggtgcgcggttgccgcgcaaggtcgatgcggtgatcgagtccgtgggggcggccacatggggccattcggtgcggtcggtgcgtcccggcggcaccatcgccatctgcggcgccaccaccggcgaccagcccggtgcggagctcacgcgactgttcttccaggacattcgcgtgcagggctgcaccatgggttcgcgcgaggttttcgcccggctgctgcgcttcgtggagcacgccgacctgcatccggcgatcgactccgtggtcagcgggttggacgccgcccccgaggcgttcgccagaatgatcgccggcgacatgttcggcaagatcgttattgagctgtaagcctcacagaattatgtattgagaacgattcgctgcgtggcttaactccgctatcaggagtacagtgggccttattctcaataactagggagtaaatgataatggcaaatgaatccaagcccgaagtcgcagtggtcatgggatcggccagcgactgggagaccatgaagcgcgcctgcgatattctcgaccagttcggcgtcgcctaccacaagcaggtcatctccgcgcaccgcacgcccgagctcatggccgagttcgcgcacaacgcccgcgccaatggcctgaaggtcattatcgccggtgccggcggtgccgcccacctgccgggcatgatcgccgcgcagaccacactgcccgtgatcggcgtgcccgtgcgctcccacgccctgtccggctgggattcgctgctgtccatcgtgcagatgcccggcggcattccggtggccaccaccgccgtcggcaactccggtgccaccaacgccggcctgctcgccgtgcagatgctctccgccttcgagcccgaactggccgacaagcttgaggattaccgtaacgaactgaaggaaaaggtggccgaatccaatgcccagcttgtctgaagaaacgggcggccgcgtctccatgctgatgccgggctcgaccatcggcatcatcggcggcggccagctcggccgcatgatggctctgtccgcccgctacatgggcttccgcgtcggcgtgcttgacccaacgccgaactgcccgaccggtcaggtggccgacttccagatcaccgccgaatacgatgacaaaaccgccatccatgatctggccgtgcagtccgacgtgctcacctacgagttcgagaacgtggacgccggcgccatcgacgaggtgcgcggcatcaccgccaccccgcagggcaccgacttgctgcgcgtgacccagcaccgcgtgcgcgagaagcagttcatcaacgaccacggcaccgccaccgcaccgtggcgcgctgtcaacaacttcgatgagcttgacgccgcattgggtgatattcattatccggccgtgctgaagaccgtgtccggcggctacgacggccacggtcagctcgtgctgcgttccgacgccgacttggagaagatccgctcccgctccgaccgtggtggtggcttcccgccgagcatcctggaaggcttcgtcgacttcgcattcgaggcttcgattctggtctccggcaacggcaaggacttcgtcaccttcccgattgtgcgtaacgagcaccgcaacaacatcctgcatatgaccatcgcccccgccgaggtgtccgaacatgtggctcgcgaagcgcatgaactggcgattcgcctggccaagggcttcgaactggctggcacgctggccatcgaactgttcatcaccaaggacgatcgggtcatcgtcaacgagctcgccccgcgcccgcacaactccggccactacaccatcgaggcctgctcgatggaccagttcgacgcccacatccgcggcatcgccggctggcctctgcccaagcccaagctgctctcgccggccgtgatggtcaacgtacttggccagcatgtggaaccgacgcgcgcgctgatcgccacccacccggagtggaatgtgcacgactacggcaaggccgaagtgcgccacgaccgcaagatgggccacatcaccgtgctcaccggcgacccggccaagacggtcgctgaccttgaggccaccggctgctgggacgacctgaaaaagaaggcgtgaccttaccgatggttgaacatatcgaacgccagaccaagcagaaggacgcgattcgcgccgccttggccgactgcgaggagttcatctccgctcaggacctgcaccgcaggctggaggacgaaggctcgaaaatcggcttggccaccgtataccgccagctcaacgccttggccgatgccggtgccgccgacacgatccgcctggacggccagcagctgttccgcctatgcggcgacgacggacatcaccaccacttggtgtgcaggcggtgcggcaaaaccgtggaaatcgacccgcccagcgaggcttggctgcgcaaagtggccgacggccacggcttcaccgttgaatcccacaccttggaggtcttcggactgtgctctgattgccaaaaggagcagaaagcgcagaaggctcagaaagcagtgagcgaataacaaatgggatcggctccaaagccgatcccatttgttattccgctgctattccactgacttcagcgcgccgagcatgctgtttctttgaggtcgtgttctgcacgatgcctttcacgccgtccagcttcatgagcttggcgctgcgcgactccacattggaggtctcgtggttcttgagccgcaccatataggcgttcgactggtgctgctcgccgaacacgtgcttatagccacccgaagtcatgaacatgaaatgcccgaagtagggaagccggcttgtcacgcagcttgcgtttggccgctacccaggccggtaccacggtgctcgcccaggccagcaggaacgccgccagggtgatggcagggtggaacgccagcatgacacgccgatgtaaatgcaaatgataataattctcaatacatgttattctgtcgtgttggtggctgggcgatgatgcagcaacagcagcatcgcccagccgttcggctaattagagaggaaaacccaatcatgtccatcatgtccaacgccaagcgcgcgctcgccatcgcggccgccgcggcgaccctgctctcgatggccgcctgcggttccagcaacgccgccagcggcaagtccgattccagcggcgccgcgtcttccggcaagatcgaggtcgtcgcctccatcaaccagtggggttccgtggccgaagacctcggcggcagcaacgtcgaagtcaccaacatcatgaccaagaccaacgtcgaggcgcacgattacgagcccaccagccaggatgtcgccaagttcggcaccgccaaggtagccgtagtcaacggcgccgattacgacccgtgggccaccaaggccgcccagccgaccaaggccacgctggtcaccgccgccgaaaccgccggcatcaaggaaggcgacaacccgcacgtctggttctccgccaaggtgcgttccaacaccgccgacgccatcaccgccgcctaccagaaggccgacccgagtcacaaggacgactacgccaagctcaacaaagaatggcacgccaaggaagaccagcttgagtccaagatcaaggagacttccgccaagaccgagggcctgccgtacgccgccaccgaatccgtggcctggtacctggccgacgacctcaagatgaccgacgccactccgaagggctacgcccaggcctccgccaacgagagcgagccgaccccggccgacatcaaggacttccaggacaccctgaaggccggcttcatcaagatgttcgtcttcaacagccaggaagcaaactccactactgaccagatcaccggtgccgccaaggacgccaacgtgccgatcgtggagctcgccgagcagatgccgaagcagtacaccaacctgctcgactggatgagcgcactggtcgaccagttcgccgccgccgtgaagcaatgcggcagtagccgtcaatccgcaacagcgataaggggaataatcaagtcagatagcgaggcgttgtctaggggagaacagaacacttcgctatcagggataggctccttatatatcagggtgcttcggggatgtcccgaggcaccctttgcgttagggtgaatagttaggaaacggtaagaaaaatagtggaactatggattttccaaggttcagcggcaacaatatgcccttgaaaagtcacatacggaaacaggcgaatgagcgagaacactagtaataccaccacagtgaaaccccatttcaagctttgggccaaaaaggtcgaagccaatgaagtcacgccccaacacccccacaagcccttccccggctgggtgtacggcgtgctcttcgttatcttcgacatcattgtcgtgacggcgctcgaagtgggcgtttcgtccagctccacccgtgtgcagctgtccagtccgaccgtcggattcggcttcgtgagcaagatgtggaccgacggcaatttcgtattcgtgctcaacgtgatacttgtcgcgttgctgtacctcatgttgctgatgctgttcaaccggttctggacggcaagcatcgtgattctcgcggtcggaatcatcgtggccgccatcgaacatttcaaggtcgagatccgttacgaggccattctgcccgccgatctaggcttccttggctcgaacaccggcaacatgctcaccttcattccggccggtgcgcatgtgaccatcctcgtggcactcggcgcgttcgccgtactgctcgcgctgattctggtgctgcgtcatttcgatgggcgcaaaggtcgcatgattcgtacggataacctgagcctgaacctcacctcccgtctgattcttctgctgctgccgattctggtgttcgcgttgtactgcattcatgtgagcaccaccgattcgctggccaacaagttctcccgcgccttgggagacacgccatccatgtgggattccgtgtatgacgcgcagcgcaatggtccgctcgtggccttcacccgccagctcaacccgaagatcatggacaagccgagcaactactccgaggagaccatgaagaaggtcgccgctcgctatcagaaggaagcggagacaatcaacgcctcccgcaccaacaacctcactgattcgacagtggtgtacgtgttgtccgaatccttctctgacccgagccgcgtgccgggactgaagaccaataaggattcgatgcccaacatccgcaagatcaaggcgggcaccacctccggcctgatgctctcctccggctacggcggaggtacggccaatctcgaatacatgggactttccggcctgagcatggccaatttcgagtcctccctgtccagcccgtaccagcagctggtcccgagccagcattggactcccaccatcaaccagctgtggggcgcgcccgtcaactcgctcggctaccacccgtacgaatccagcatgtactcgcgtgccacgaactacaagaagttcggcttctcgcacttctacacgttgaccggtccggacgtgatcaagtatcaggacaagatcgacgagtcgccgtacgtctctgataagtcttcctatgattctgcgttggaaggcatcaagtccggcaagacgaacaagttcattcagatcattaccatgcagaatcacatgccctaccacgagtggtatgagaataacgactacaccgccgaatccaccacgggtacgccgctgggtgatgatgaacagcagtcgattgagacctatcaaaagggtgtggagattaccgatcaggccactcaggagttcctgaatgaactggatgcgctggataagcccgtcaccgtggtgttctatggcgaccacttgccgggcatctactcgtccgccagcgaggatgacaacaactccttggccctgcacctgaccgattacttcatctggtcgaataaggcttccagctcccaaggcaataaggcaagcgatgcagcctactcctcgccgaacttcttcgtggcgcaggccgccgatcacatgaacgccaaggtcagcccgtatctggcgttcctgaccgaaatgcattccaagatcgccgctatggaaccgcctgtggtcaacaagatccaaggctgggatcgtatccccgaaggccagaacatctatcttgatcagaacggcaacccgatgtccaccgatgacttcgacaaggaaaccaagcagttgcttgccgactacaagctcatccaatacgacatcaccgccggcaaaaactacctcaaagacacggactttatgacgctgccgtaaagcagacagcctagtaggctgtctgtaggcagcgtgcgagccgacagacgagccagcaaggcgcggggcgtagcccgtccaaaattgcagtagcgctgccgtaaagcagggggtgctttcatgacgaaccagactttcgaacaactgaagaagacttacgaatccggtcgtacccggccgctggcatggcgccgcgcgcagctgaacgcactacgccgtctggttacggagaaccgtgatgcctttgtctcctcggctatggctgacttgggcaagcctgcggctgaaaccgtgctcatggaactgaacctggtggctggtgaagcacagttcgtgcgcaatcgtctgagcctttggaccgcccggcatcccaaagcgatgcattggatgttgcagccggctgccggatggacgattgccgagcccaaaggcgtggtgctcatcatttcaccgtggaattatccggtgctgctggccttggaaccaatggctgatgcgctcgctgccggtaacgccgtctgcttgaaaccgtccgagctttcaccgaatacgtccaagctccttgctgagttggtgccgcaataccttgactccgaggccgtgcgcgtggtcgaaggcgggcccaaggaaaccggcgaactgctgaaatgcccgttcaaccacatcttctataccggtggcggccacgtcggcaaaatcgtcatgcgcgcggcggccgagcatctgacgccggtcacgctggaactcggcggcaagtcgccatgctttgtggatcgcactgcggacatcaatgtggctgcacgccgcattgcgtggggcaaattcaccaatgccgggcagacttgcgtggcacccgactatgtgctcgccacgccggatgtggccgaggctctggccgagcgcatcgccgtagccatcaccgaattctatggcgaagatccgaaggcctcgcctgattttggtcgtattatcaacgatcgtcattttgaacgactgtgcaagctattgccggtcggcaccgtgccgcctgaggagccgagctcgccgctggtgcaggtggcatcggcggtaggcgcggccatggatatggttgggcggcgcttcaatgccgtgactactgggcgcggtggcgcgggggagatggccggcagcgcgaacaatgcggcgaagccgacggccggttcgaatatggcagccgctgatgatggtgcgactgcctcggccgctgttgagccgagcgagattcacaaggtgcccggcgtgttcgacctggccggtcgaatcgtttgcggcggcaaggtcgatcgtgccgcccggtatatcgcgcctaccgtgctgtacggtacgtcgccagatgcgccagtaatgaaggaggagattttcgggccgattctgccgattctggtggtcgaggatgccgagtccgcaatccgattcatcaacaagcggtcccggccgttggctgcatatgtgttctcgcgcgatcacgaggttcggctgactttcgaacgtcagaccagctccggagccttgggatattcgctgccgttgggccatctgctgtccagccggttgccgttcggtggcgtgggcgcgtccggcatcggcacctaccacggcaaagcaggcttcctcaccttcagccacgtcaaaaccgtggttaccaagccgcagttccccgacactctgcgcctcgtgtacccgcccttcaatgaagccaaggccaaactgttcgacatcatcgccaaattcagctagcgtgatatcgctcgctgatattgggtgatggcgttgtcatagtgacgttcgctgtcccggtaattacgtcaatcgattgattcgtgtaccgggccagatttttctgtcctagtatttgatttcgggtcatttttgcttaccgggacaaaactgacgccggaagtatcgtccgcgtattacgaaaatggcggaatagtgcggtttcgtatggaagggaatttcaaatattcctatattcgaggggttcagctgtcctggtttgcgaaaaagagccgaaatcggctaccgggacagaaaaatctggcccggtagccacgtcaatcgattgacatgtctgccaggccaaaaatatgcagcagatgcgccgcttctgttacttcagggctttgaagccgatgtcgtggcggtaaaacagtccgcgcagctcgagcttgtcgatgattgcgtagaccttgtcctgggcggacttgatgtccggagcggaggtttcgacgagcagcacgcggccagagttggccacaaggttaccgtgctcgtcagaggcgacgccggcgtagtagacgtgcgaatcctcgtcgacttcgatttcgggcacacgggcacccttgatgacgttctccgggtagccgttggaggcgatgaccacgccgagggtggcgttggactcatcccaggtgaattcgggggtttcgccgtcgagaatggcggagatgccggcaccgaggtcggaggtgagcttcgggagcacgacttcggtttccgggtcgccgaagcgggcgttgaattcgatgaccttcgggccgtcggcggtggcgatcagaccggcgtacaggataccggtgaatggcgtaccttcctcggccatgccttcgacggtggggcgcacgattttctcgatggcctcgtcgaccacggactgcggaatctgcggcaccgggctgtaggcacccatgccaccggtgttcggaccctcgtcgccatcgtgggcgcgcttgtgatcctgggagatgggcatcggccagaaatcggtgccgttgacaaagctcatcagggagaattcctggccgtccaggaagtcctcgataacgaccttggcaccggcggagccgaagcgatggtcgatgaagatgtcttcgagtgcgcgctgggcggtgtgctcgtccatggccacggtcacgcccttgcctgccgccagaccgtcggccttgatgacaatcggggcaccgtgctcgtgtacgtagtcctgcgccatctcgagatcgctgaaggtcttgtattgggcggtcgggatgttgtgtcggtccatgagctgcttggcgaagtccttggagccttcaatctgggcggcggccttggacgggccgaacgccttgatgccggcggcggcgaaatcgtccacgatgccttcgatcagcgggacttccgggcctacgaacacccagtcataaccattgttcttcacgaattcgataagtgcggcgtgattcgactggctcagctgcgtggtgtggatgccgtccttgagcatgcccgggttgccgggagccacggtgacttcgtcgatgctcggtgccttgagcagcgtgtaggcaatggtgtgctcgcgcgcgccggagccgataaccaatactttctgacccatgttgttcctttcctgcggaaagcgagttacttcagtacgatttgcgtgccggtggtgtcggctgcgatctggccgagcacgtaggcgggctcgttgttgtcggcgagcagcttcagcgcctcgtccttgcgagcgaggtcgatggccagcaccatgccgatgcccatgttgaagatgttgtacatctccttatgatcgatgttgccagccttctccagcacgtcgaagatcgggagcacgggccaggtgccgagctcgatttcggcggccaagccgtccggaatcatgcgcgggatgttctcgatgaagccgccgccggtgatgtgggccacgcctttgaccacgcccgccttgaacaggggagagagggccttgacgtagatcttggtgggggtgagcagcacgtcgccgagcttttcgccgcccagctcgtcgagttcggtgtccacggtgtagccggcctgctcgaacagggccttgcgcaccagggagaagccattggagtgtacgccggtggagggcaggccgatgagcacgtcgccttcagcgatggtggaaccgtccacgatggcggacttttcggcaacgccgaccgagaatccggcgagatcgtattcgtcttcgtcgtacatgcccggcatttcggcggtttcgccgccgaccagcgcggaaccggcctgtacacagccgtcggccacaccggccacgacctgctcaagcagtgccgggtcgttcttgccgcaggcgatgtagtcaaggaagaacaacggctcggcgccctgggcggcgatgtcgttgacgcacatggccacgcagtcgatgccgatggtgtcgtgcttattggccagcttggcgaccatgagcttggtgcccacgccgtcggtgccggagatgagaaccggctccttgtagcccaaggaggccagatcgaacaggccgccgaagccgccgatgccgccgaccacgccggggcggttcgtgcgggccacgtgcgacttgatgcgcttgacgacttcgtacccggcttcgacgctcacgccggcgttctcatatgcttttggcatttggttggcctttctacttattttggctcccctctggaggggagctgtcggcaaagccgactgaggggaggcaagcgcctctggttcaaagaattgttattgagtggattggtggtgagctattcggcatccggctgcacggtgttgtactcgttgccgatgtacttgctcttgtacagcgcgaattcaggcagacgcacacggtcctcgggcgtgagggacttcaggaagtcggcctcgtagtcgtcgagcgcagtggggtagtcgccgttgaagtaggcgacgcacaggccaccgtatggggcgtcggcgttcagtccgatggattcgaccagaccgtcgagcgaaaggtaggccaaggaatccgcgccgatgtattcacggatttcctccacgctcatcttggctgcgatgagttccttggtggtggagatatcgatgccatagaagcaggggtacttcagcggcggggagctgatgcgcatatgcacttcagcggcgccggcttccttgagcagctgcacgatgcgcttggacgtggtgccgcgcacgatggaatcatcgatgacgataacgcgcttgcctttaaccacgctgcgcacagcagagagcttcatacgcacaccctgctcgcgcagttcttgcgtgggctgaatgaaggtgcgggccacatactggtttttgattagacccatttcgttgggcaggcctgctgcttccgcatagccggatgcggcggacaatgaggagttcggcacgccgataaccatatcggcctccaccggggattcggcggcgagacgtgcgcccatgcgcttgcgggcggagtgcacgttgacgccatagatatcggaatccgggcgggcgaagtagatgtactccatcgagcagatggccagctgcgtgttgttggtgtactgcacgatcttgtagccgtgatcgttgaccaccacgatttcacccgggcgaatgttgcgcaccagctcggcgccgacgacatccagtgcgcaggtttcggaggcgagcacgtaggcgccgttcttcatcttgccgagggagagcgggcggaagccgttcgggtcgagtgcgccgatcatggcgtcttcggtcatcagcaggtaggcgaaaccgccatgcaccgtgttgagcgcttccttgagcttgtccataaaggtgcgctgcatcgaacggcgaatcaagtgcatcagcacttcggtgtcggagttcgaatggaagatggcgccttcgtcttcaagcttgcggcgcagtgacgggcagttcgtcaggttgccgttatggcacagagccacgtcgccgtcatggaagcggaagatgaacggctggatgttgtccgtggtgcccgagccggccgttgcgtaacgcacgtggccgatggcgcaattgcccttcagtcgttcgatttcgcgctcatcgccgaacacctgggtgagcaggccgagtccgcgatgaccgatgagatgaccgttatcgttggagacgatgccggcaccttcctgaccgcgatgctgcagcgcgtgcaggccaaaataggtgagtcgtgaggcgtcggggtggccccatacgccgaagatgccacattcctcgtgaatgtcttcgagttcagccgacaagccaaagctcctttttcaaacaggggattaactatctatcaaccctaccaatcggcggctacatcgcgtgttgtggggtggtggaacttgttggggtttgcggacgcggtttaagcaccagatcagtcaagtatgaatagtggcttaggattttggcctttcgctgtttgtggtgggtggttgtggtgtggggtgatgccgacgggtaggttggaagcatggatacctcttacctgttcaccgccgcattacctggtgctccactttgtgctcaagcgtgataccgaattgtcggtgtgacgtgatcggttgactttcgtcaacgcaatttgaaaggctccgacggtattatccgtcggagcctttcgtcgtatgaatccggtgcttgtttttcggcttcgtctcagtgcctgaaatggctgaagaactcgatggtctcgggatcctgcgactcgtccatcacctcagcgggtgtgccgttctcggcgatgacgccgtgacggagcagtacgatgcggtcggccgcttcgtgggcgaagctcatttcgtgcgtggccatgaggattgtggtgccttgggcctttaactcggcaaccatgttgagcacttcgccgaccagcatcggatcaagagcggatgtgatctcgtcaagcagcagcagttccgggtcggtcatcagtgcgcgcgcaatcgccacgcgctgctgctggccgccagagagctgatcggggtaggcactggctttatcgcgcatgccgatgcgttcaagcagttccatagcgcgggtttcggcgcgatccttgctccagtggtgaaccttgattgcggcaagggtcacgttcctgagcaccgacatgtgggggaagaggttgaactgctggaacaccacgccgatacgtgcgcgaatcttgtcctggtcggcacgcgggtcggtgatatcggtattgcccagccaaatctggccgtcatcgacctgttcaagcaggttgacgcatttcatcaatgtggatttgcctgaaccggaaggccccagcaaagccaccacctcatgttggtgaatgtcaaaggaaatgccacgcagcacctgcgtgtttccaaaggatttgcgcacgtcatcaagacgcagcaccgtcttgttgctcacgggggagtcactcgcctcggtggtgatattggtcatttcgctcataccgttcctccgctgagttcgcgcttacgcagacgttccgtgtaccagtcgttcagcaggatgaacggcacgctcatcaggatgaacagcaggctggcgaccacatacggcgtgaagttgtaggtgctggccacgtcgatctgtgcggcgcgcacggcatccaccgcacccagcacggaaatcaggccgacgtccttttgcatggagatgaagtcattcatcagtgcgggcgccactttgcgcaatgcctgaggaatgacgatcagtcgggtcgtctggccggaggtcaggcccaacgagcgggccgaggctcgctgagaaggatgtacgtcgttaaaaccggcacgcagcacctcggagacgtaggcgctgtatcccattaccactgcaatggtgccgagtaccgagggatcgatacggccgaacaagcctaggccgggaatgccgaaaccgattagatacagcacgacgataataggcacgccgcgcatcacagtcgtgtagatcaatgccaggatacgcagcgggaacagaataggggagcggctggtgcgcaccagcgcgatcagcgtgctcagaatcgccacgccgaccactgcgacgagcagaacgcggatgttgagccataggccgtcaagcacatggggaaacgatttgacgaagtattcgccggagaagaaggtctccttgactcgtggccagccgggggagagcttcaagccgatgacgatgaccaccacgaacacaatggtgctgatcagactggtaatcgtcgattgaatttgctgatgaacacgatattggcgtcgttcgagctcgacctgacttacctcgtgtccgtcaggggcattgtgctgcctggtttcggttggtgctgcggtcatgtgatgaatgtcgctcgcttcctgaatgccgggatggccgggtgccacaggaaaattcccgcagcgcccggccaaggtgttgtgaccttatgatgtaagcctacttcacttacttcttcagttcggtcaggtcggtggtgtactcggccagccacttgtcctgaagcttcttgatggtgccgtcggcgttcaggtcatccactgccttggtcacggctgcagtcagcttggaatccttcggcagcacgatgcccatgccgctcttgtcttcggagtcaggcagacggccgagcaccttggcgtccttgacctgctcggactgcaccatgtacacgcattccacggtgctggtgaccagtgcgtcgatctgaccggcgtcaagtgcctgagccagtgcggcatcatcattgaacgtctggatgtcgtccttgatgttcgccttggcgtagtcgtaggcaagggtgccgaccatgacgcccacggtcgcatccttcagatcggataccttggtggcgttggcgaacttgctgtctttcttgaccacgacggactggctgtcgttgtagtagctggacgagaagtcaacggccttcttgcgctcgtcggtgatgccgaactgctggatgttgaaatcccagtccttggcgccgggagcgatggcggtgtcgaatgcggtgcgggtccacaccacgtcgctcttcttgaaaccgagcttgtcggccactgcgtaggcgacggccgcctcgtagccctcaccgctttccggcttgtcgttcataacccacggctcgtaggccggctgtccggtggcgatggtcagcttgcccggcttgtacgtctgctgggtgatgtcgtccgaatcggtggaattggatgcggtggactggccggaaccgcaggctgcggtgaacgacagagccaggatgctgacggtggccgcaatggtacggacgatgtgtcgcttattgaacatgggtttcctctcctcaagtgttcgtcatgcacacggttcaaaccgtgcttgatgcattcgcgccaattgtatggctattgggttacaaaacatcgatattttcggatgctggctatcgccattgcttatggccgactagagccgcgcaatctggcgcgtaagcggacggatatctcatattggcgcagagcgaaatggcgttcactgttcgagtgtgaagccgtcgaatacgaatcccggactgaccacacaggagaccagcgcatcgccctggcctggcactgtgcgctgccagacgccagccggtacgaccgcatgtcccgatacggttacgtcggcctgatcggtggtgatgccggaacccaaggtgattacggttcgcttggattcgtcggattccggagtctcgtcgctgccgccgagctccagtttgaccgatgccgggccatgccacagccagacctcatccgcatcgaccttatgccaggcgctggcatctccctcgggcagcaggaagtaaatcagtgacgatagcggtcggcttgaggcctcatccgtgtgcggggattgccagtcacgcgtgtaccagccgccttcggggtgggtttccagtccaaggcgttccactatggaccgggcgtatggactcatgtcttgcaaagcgacgctcataatgagatctcctgttcttggcgggtttgctggtttttggcttcttgatatcaggtcaggtcagcggtgtcaccaggcgttgttgtaggcttcgcgcccggatatcaccgtggctcggttcgtgcctgcgccgtgcctcaccagtgtttccagcgtttcttcgatgccggccggagatgatgtgtcgacggggatgtcgaagaacgcgaaatcagccaatgcgcccgcgttgatctgtccaatgcggttgcggcccacgtgcatgcccatggaggcggcgccgcccagcgtcatcatacgaatcaggcgatgtgtcagatcgtcgctggcatagccttgttcgcgggccaggccgtaaagcatcgacacgtcatcgagcagatcgagggtcggcgtgctggagagcgaatcggtgcccacgcttaccagattgccttcctcgaggtattcgcgcaccggtgcatctttgccggtgttggtaatgcgattcgatcgggggcacaaggccacgcccacgccgcgctgacgtagaatacgccgatcctcgccattggcccacacgccgtgtgcaatgtgcacatccgggccaagcgagccaagctgatcgacgaactggatggcggaggcgcctttgcccacttccttgagctgccggtagctttcccaatcgtggtcactccagtcggccgccgaataagtggtgagcaccggcggataagtgccggcctcgagcggggtctccgccagatggatatgcagtcgcatgttcagctgacgagcaatgtctggaagatcaacgaacggttcggactccagcgtatacggagcatgcgggctgatgccgaggtttggcagctgctcctcgttcatccggcgcaactgccggatgagctcagtgcggcccttttccatccattcggcgttgtgccagcccattacctcccaataagcgatgccgtgcatgccctgcgaagccagcgcgccggcggcgtccaaatcggtgacgatgtctgcggcggccgtcgttcccgattcgaccatctggcgagcgccgtcctcggcccactgcttccatggctgggtcttctgcgcctcggcgtacacctcgttgaatgccagttcccaggcgcggaaccgatcgtaggtgccttgcccgacctgcaccatgccgctgtactgcagatgagtgtgcgcgttgatcaatccgggggtgagcaccccatcccaatgccgttcatggatggtgccgtgagccgtcatttcctgcttcagcgccttcagcacccagcggcgtttacctacatgaaccacgcggtcgccatgtatggcaactgcgccatcgatgatgacggggcccgtcacggggatgatgagtttggcggaatacagtgtcacatcatcgataagctcggtatcgacggtcggccaggtgttgtcggtcatattctcctcgctgcgttgtgttcggtgccgtgtctatggctatcggtcggcgttctctcggtcgttttccgcgaatctggtcagtcgccaattgtagccgttgtcctccacggcatggctggctcggtatccgcgcgccttgagcgcgctggcggcgatgcgctggtcggtcgctgcgtcaagtctgataagcgtgtgatccagtgtgcctcgatgttccagaagatatgcgacggcgctggcctgtacggcgaagctcagatccatgatctcgattggattgccgcctcccaccgtgtagttcacgccatcgccgtcggcgattagcgtgagcgttggtccgttgggaacattgagttgcacggtgtccctgttgacctgtggggtgaagtcgcttacctcgtccaaggcgatttcgttggcgatgccgccgatcactgcgagcgccgcgccctcgtgcattgcgcgcatgtgctcaagtgtgaccgtatgtctcacgccagtggcggacaccaccatatccgcgcaagggagtgcctcgtcaatgtcttgtgcggcgaagccgtcgaacaccgctttgagtgaagccactggatcgatatcgcagatggtgacttcggcgccaagcgcgcgaatgcgccgtgcgaagccttggccgaccgggccgtagccgatgacggtgacgttcttaccgtcgaatgcatgctcgccgagaatgcgctgcatggtggtcacgcatgtctccccagtgccgtgggcgttgtcgaatccggttttcagcacactgtcgttaacggctacgaccgggtaggtgagggctcccgcttcctgcatctgctggaacgcgcgtacgccgctggtcgtttcctcggccactccaatgaggttcgccgtgagttcggggcgttcgagcgaagcgagacgggcgaagctggcaccatcgtcgatgatgatgtccggctgtatttcgtccagcaggtgcagggccgcctcgtgcgcctgttccgcggtccagtctcggctggattcgaccgtgattccttcccggcgcagctgttccgccactcggggatccgtggaatccgggccgcaatatacgccgacgattgcgccggcggccttaagcttgcgcagcagaatcgcggtctttggctccagtatcagacagacggcaatacgaatgcctgagaaatcgacgcgagtggtgaggctatccatggtgtcgcgtaataccggcatgtgctgttccgcgtactccattgcctccagtccgcttgccttgcgcatatcggtgatggaatcgatgctttgtgtgccgtcgcataggaattcctcgttgtgctcgtcggtcatcgtggcatcttcgacggtcatgccccattgctgggcctgagacttgatttcggcatgcttctgcggctccggaatcgcgagtcgggctcctgccagtgatcgattcgtcttctgggatcgggctgccgcccacgctgcaaaatcgctgtctgctgtaatgcttttcttcatattccccatggtacgcatgcatgccgctgctccgccgctgcgcgtgtggcgtgggtgaagagcgtgtttgggcgcgttgcgtgcgtcgacttcggcagtttcgaacaggcatgttgcatcgaacaaatgttcgactgtgttgatatgctggtcgggccagcggtggtaaggaggtgatggcgatgggcagcggaacggtatcgacgcaacgcgagcatacctatattgccattgatctcaagtccttctatgcctcggtggagtgcgtggctcgtgggctcgacccgttgaccacgcatctggtggtggccgatgaaacccgcaccgataagacaatatgtttggcggtctcaccctcgctgaagaactatggcattcctggccgtgcgcggctattcgaggtaaaacagcgcctgaatggagtcaacatcgagcgcgcggtccatgctcccggcggccgattaatcggggagtcctgcgatgcatgcgacctggaacgctcgccgggactcaaggcctcgatggtcatcgccaagccgcgcatggcgcactatctggaaatcagcgggcaaatatatggcatctacctcaaatacgccgcacccgagcacatccatgtctactcgattgacgaggtgttcatcgacgccacgccatatctgcgctcgctgggtatggggccgcatgcgatggcgcgaaccatcgtgcgcgaaatcctcaccaaaaccggcatcaccgccactgccggcatcggctccaacatgtatctggccaaagtcgccatggatatcgtcgccaagcacatgcccgccgacaaggacggcgtgcgcgtggccgaactgaatgaaatgtcatatcgtcggctgctttgggatcatcgtccgctcaccgatttttggcgggttgggcgcggctatgccaagaagctcgagcatgccggactgatgaccatgggcgatatcgcccgatgctcggtgggtcgtgcttcggattactacaacgaagacctgctgtatcgcatgttcggtgtcaatgccgaactgctcatcgaccatgcgtggggctgggagccgtgcgaaatcgcggatatccgatcctatgagccaggtgcgcacagcattagcagtgggcaggtgctcaccggccccgccgactatgccacggcccggctgatcaccaaggagatggccgatgcgctggccctcgatctggtcgataaaagcgtgctgacgaaccgactgacgctcgccgtcggctatgacatcggcagtcttgattcgtcaaagctcgattcgtgcgctgattatgcgatgaaacgtgccgctgagcgggcggcgaaaagctatcaagggccggtgaccatcgaccgatttgggcgcaaggtgcccaagagcgcggtcgggtcgattggtttgggtgatttcacctcgtcgtcggcacgtattcgtgaggctatgacgatgttgtacgagcgcattgtggattcacgcttgcttgtgaggcggttgaccgtcatcgccgatgatgtggccactccggaggagctggccgccggcaaacgctatgaacagctcgacttgttcggtgatgacggggcccaatcgtatggatccgattccaccagcgaaaaagatggagagcatgatatccagcgtgcgctgctggatgtgaaacgtaaattcggccgcaacgccgtcatcaaagccatggacatggaagacggtgccaccggtcaggaccgcaaccgtcagatcggaggccatcgcgcatgaccctgcaagagacccgtgcgtacgacgacatcatcaacctgccacaccatcagtcgcgcaagcatccgcacatgtcccgccaccagcgggccgcgcagttcatgccgttcgcggccctgaccggctacaaccaagtcatcgagcaaacagcaaaaaacgccgaaaccgccatcgctcaggccgaagcccaaggcgataccgatttcggcgcttgacaatcgctctcgttggaggaagtctcagattcgtcagcctacgtgacgttcgaagcggtggaagccggtgatcttgtcgatttcggccatcgcgtcagccggaatcacaaagcccgcggccttcatgttgttctccagttggctgggcttggaggcgccggcgatcacacagctgatctccgggtgctgcaggatccatgccatggaaagcaccggcaggttcgtgccgagctcgtcggccaccttgcgcagctgctcgaccttgtcgaggttctcatcggtcagcagatcgttgatctggtggtcggactgccacgtggcgcgagaaccggccggcagcggctgacccttgcggtacttgccggtcagcagaccctgcgcgagcggggagaacgtggtgataccgatgccgagcttgcggcaggtgcccatgatctcatgctcgatgtaacggtcgttcaggttgtactgcggctggaccacggtgatcgggtacaggttgtagcggtcgatgatgcgctgggcctcttcaaggcgagccgaaccccactcctcggaaacgccatagtacagcaccttgccctgggcgaccaggtcgctcatcgcgcgcaaggtctcggtaaggtcggtggtctcgtcaaaacggtggcagaagtacatgtccagataatcggtctgcatgttcttcagcgtctggtcgatgctctcgaaaatgtgcttgcgggacaggccgcggtcgttcacgccttcgccggtggggaagtagaccttgctggaaatgaccagttccttacgcgggtactgcttcagcgtcttgccgaggaagcgttcggccgcgccgccagaataggcgtccgcgcagtcgaagaagttgacgccggaatcgtaggcgagtttcacggtctccttggccacatcctcggccgccgtgcccttgagatccgtgacccagctgcccagtgcgacctcgctgatcttcagtcccgacttgccaacgctgcgatacttcatgtgtgctccttgataatcaatcgtcaccgtcgtctcttcatggccggccgtgaacgctaacaattctgattaaaacagttcaaccccacttgaacgcaagttggcggctattgcgacacgccggtggtgacttcgcgggcgcaacgaatgaaatcatcaatgacgctccaccgatacgatgtggccggaacgccgaactgaatggcatatgcggtatccgggccgcaatccagcacgcgcaaagtacgcaaccgttcgccgtcaagcagcgctggcaggaaccgctccgggcataggcaggcacccatgccgtaatggcacagttccagcagagtcagtacgttatccgaacgggctgtgactttcggctcaaaaccggcacggcggaacagcaggtcggcaatgcggccatcgatgtcctgcggattgcccagcaaaaacgggcagtgtgccaacgaagatagatcgcctgaagcaatggcgcgttcatttggaatcgtgttggggatggcggaatcgttggcaatattagtctggctgttcgcggttccggtggtgactaaatccagccataatgattgcgcaataaccagtaccatacgttcgtcgtagaatctcctgttatcttgagtcatggctcgtgcgaatagcgttgatgtttgcgactgcgggtcatgagatggaatctgagatgaggctgtagccggaagaggagaggatcgcatgctggaagcgggcacgatgttgctgttctgtgcggtgctgtttgccagcgtcgccctcggctggtcgattattcccgcgctgttcgttggtgtgctgctgttcatggggtatgggctggttcgccggtgctcgttgcgcgcgatggcgagccgtgcggccggcagcgtacggtccgcggggaccgtggtggtggccttcgtgctcatcggcgtactgacctcgctgtggcgggccagcgggaccatcgccttcatcgtggcccattcgaccgcggtgattcacgccgccacggtgattccgctgtcgtttctactgtgctcggcgatgtcggtgctggtcgggtcgtcgttcgccagtgcggcgactatgggcaccatctgcatgtcgttgggattgtcgatgcaggcgaacccggtgatgctcggtggcgcgattcttgcgggcgtctatgtgggcgatcgttgttcgccggtttccaccagtgccttgctggtcaaacagcttacgcatacgaacctgttcaatactattgcccgcatgctgcgcacgggtgcggtgccgtttgtgctgagttgtgtggtatacgttgcggctgcggtggtggagtggctgtgcgcgagcggtggttccggatttggtgcggctagtgcggctgctacggctggctcggctggctcggctagagcggctgtttcaaccaacgcaagcagcataaccgatatcggcggattgttctcatcggccttcgatttgcattggcttaccctagttccagcattactggtcatcgtgttggcgttgctgcgtgtggatgttcggctgcttatgctcgccagcattgccgcctcggtcgcggtatgcgtgggcgtgcagcacatggaatgggcagaactgttgcggctgcttattttcggttaccatgcgcaaaatccgcaggtggccgcactcctggacggcggtggcatcctctccatgctcactgtgatggccactgtctgtatctcctccgcctacgccggcatttttgccgagacgcggatgcttgctcggctgcagcaggtcatcgagatgctcggtcatcgcatcggcgcatgtggtgccaccatgattaccgcgacttgcgcggcggcgctcgcctgcaaccaaaccctcaccatcatgctcactcaccagttgtgcggtgggctgtacggcgacgacgaatccgaacgctccgcacaagctatcgatttggaagacagtgccgtggtgatcgctccgctgattccttggtcgatcgccggtgccgtgccgcttgccaccatcaacgcgcccacactcagcctggccgccgcgaccttcctctacctgctgccgctctcgcggatgctcgcctcggctgtacgccgccgctcgggatttcggactcggcatcgatcccaaaatcaaaacccgggactcgccatcccacaccggcccaaacccatgctccacatgttcgctcatggtttccatcctaagtcgggcgattgagcgcacgaggcaatcaggccgagaactgtttgccgaattccgagaagagctgacggcgggcgaagacgagcaggccgagcagcaccagcagggagaccagcccgctgaccatcaccagcacatcccacggagcccagccgagcggaatgaacgtcagaggcaacagaccagcgacgatgtcgaacgccagatacttggcgtactcgtcaatggccttggcccgcagcacgataagcagcaccacgtcaaagaccagcgaaaccagacacgtgatcggtatgacgaacatggtgacgacatgattcatcgtcgccacaaaccagaccagcgcaatcgccagcatgatatagaaatatcgaaacatgaggcgaagcggccgcggcacgtgcagaatcgcactattgatgaacagcacgctgatgatcagcgcggccgccgatgcactggcaatcggtatcggccacgaaaacagatagctgaagaagccatgcagcagcaaaatcgtgccggttacaaacgtgatgatttccaccgccaaacgcctcggacgcagatagatctgctgcgcggggaatgcggcgggggaggcctcgccgcgcaattcgttctggcagagcgggcaacgggccatatcgccggtgaaatcgacgttgcaggcatcgcaatgcttcatgccgacgctcctttctccacatgcacgccagcgatgttcatacggccgctgatgccctgcgcggcgagaatccgacacaggttcttgatgacgttcagatcatggtagatggtggagatgccgatgctcaggtcgtcgccgaacgagcagaccgtgaaattcaggctggccggtgtggtgaggaagctcaccgaacgtacatggcgcgcgagtcgttcgtccaaggtgactcggccaaggttcgagacggtggtcgtggtctcgcggtcggcgatgaaccgggccagctccagcacccagtccttggcaggggagggcgcaagacgcagcaccggattcttttccagcgcaatcatgcggttcatatgcgattcgacgcgctcgcgactggtggcatggccgagctgctcctgcacatggcgggcgatgtcggccaacggctcatcggtcagcaatccacccataccgttgccgtgcgcggtgcgggcggcggactgctggccgtcgccggctgcgtctgggcttgttgcggaagttttcgcggagtcctcatcggcttcgatttcggccggcgtgtacgccacgtaagtcatgccgtagaagttgcgcacggtctccgacctgaagaaggcgcgcaagtcgaccggaatatccacgcgaatcgcgcgattgcgggcgcgcgagggcatgacgtcgcgaatcgcgcacagtatcgcggcgatgaggtaggaggtgagactcactccgcactgatgcgctgcaccaagcaccttgctggcgctgacgtggtattccatgaacgtaggcgcggcccggtcgatggggccggccagccggtagatcttcgtgcctggcgcagcgccggccttgtctttctcgtagtatttgtcgaagctgttttcggctttgtcgctatccgaaccgtcgtaatccgaaggcacgcccggcacgtcgtatcgctcggcgatgtaggcgtgcagcagcgacttgaacaggttgatggcgccgcgaccgtccgaaatgatgtgcgagacctcgagattgacacgattgcggaaatagcttacgcggaacagcatgcttttgggcccgtaatgcagtcgcgagcatatcggcagatgttccggctccaccagcggccggccgtctgactgttcgaggtaatgccagaacatgccgttgagcaggtgcacgttgaagctcgggaactgggcgatggcatggtcgagcgcgtgctgcaggatgtccggatcgatgccgtccgccagctcggccgaatagcggaacacggtctgcgaggagcggccagcctgggaggagtagaacttgccgatgttgtctagtcggtaccaagtacgtcttgccacgcgtcgcctccctccggtgcgttggcggtggtgccggtgccgggagctggttccagcggtgtgccgtcgaggaaatgcttgatgattcggtaggtggtggccaccagtcccacggccgacgtattgagcaggtagccgtggatgccatcgtgaattcggtaacaggagacgttgtcgttcaccaattgcaggcgacgggcgtacgcttcgtcctcgtctctgagcgggcagtattcggcggacaacaccagcgtgcgcggctgattgctcaggtcgtgcgcggtgagcggcgcgaaatacggattggtcagatcggccacggacgaacggtacatgtcgatgtagtcggccatgtcctgtgcggtgaggatgtagtcggtgccgttggtccgcaccgattcgaacgggctggtctcgggattgtaatcgttgccgactaccgggtaaagcagcatctgcgtgcgcggcatgaactcgccgcggtcgcgggccatgagcgagacggcggccgcaagattgccgcccgcgctgtcgccaaacagcacgatgctgtcgggatccggtgctgggattgtcgcagatatatcgcccccgccggcgggggctgtcggcgcagccgactgggggtaatcaacatcaacagaaccacccaccccagaaatcggcaattccccagcaaacagctgccgggctacctcatagcaatcctcaacagcagtagggaagcggtattcaggagccagccggtactcgactgagatcacacggcgttgcagacgtacggccatatgcgcgcaagcctgcgtgtacaggttgatgccgcctgtggtccaaccgccaccgtggaaaaacaggatcgtgccacgcggcgtgactgagggaagttccgtgttggcattgccggaaataccgtcggcgttgccgctcgacgtgctttccttgatgagtattttgggtaggactttgggtaatacggcgggcagaatcgcggatattgccgaggccacgggcgtgccattggcggaagattcctccagggcttcgggcaggggcgctccataggcgaccagcggcgtgaacactcgcaatggtacggcatatccatccgccataggcgcgaaggcgtcctcgacacggcatttcggattgtcgggtgcctgcttggcgataagctcttccgccacgcgctgcaatttgtacgacttgcccgcgttgggcttgatgtagctggcggccttcatcgcggcgaacaatgcctcgttgatcggcatgacgacaggtcctttcagcggcggattcggtagtgcgaacaccccaaccttagcccatgaccggcatgaacaaaaaagggaaggaacccgagagttccttccctgtgtgccgtatcagacgcgatacgcgccgattatcaggcggtgaagtattccacgccggcctcgaagatcggctggtacttgttgccgggcacgttgacgtacaggccgttgccggaacgctccgagtgacccatcttgccaaacacgcggccgtccgggctggtgatgccctcgatggcgagcagcgagccgttcgggttcacatccaggtccatgccgggggtgccggtctcgtccacgtactgcgtggcgatctggccgttggccctgagctgggcgagcacctcgtcggaggccacgaagcggccctcgccgtgggagatggccacggtgtgaatgtcgccgaccgaagtcttggacagccacggggagaggtcggaggccacgcgcgtgcggaccagtcggctctggtggcggccgatggtgttgaaggtcagcgtcgggcaggcgtcggtcatcggcacgatgtcgccgtacggcaccagacccagcttgacgagcgcctggaagccgttgcagatgccgagcatcagaccatcgcggttcttcagcaggtcacgcacggcctcggtgacggccggcgcacggaagaacgcggtgatgaacttggcggaaccgtccggctcgtcgccgccggagaagccgcctgggatcatcacgatctggctcttgttgatctcgtcgaccaacgcctgcgtggattcggcgacggcggccggcgtcaggttgttgacgatcagtgtggtcacatcggcgccggcacgctcgaaggcggcggcggaatcgtactcgcagttgttgcccgggaacaccgggatcaccacatgcggcttggccacggaagagccgacgtacacggtcttcttcggcgcgtggaagtcgatggtctcgacggtcgcgcccttgtcctcgcccttggaacggtacgggaacacggattcgatgccggactcccaagcttcctgcacagcgtccaggtccagcgtctcgccggcggccttgaacacgtactcggaggtggtggtgccgatttcgccgatctcgaccaaattggagacggccggaagcttggcatcgtccgccagctcgacgatgaacgaaccgtatgccggggtgaacaggtcgtccacggcgatgctgttgttcagggtcacgccgatgcggttgccgagcgtcatcttgaacagggcttcggcggtggcgccatagcccggcgtagagacggccagggcatcgtggaagtcggtgagctcctcgatcacggagaacacctcaagcagcgcatccttgtccggggtcagaccgtcggccaggtagcgcggcgcgatgcgtacgatacggtgatcggcgtccttgaattcaggggaggtggcgcgcttcatgttgcccacggccacggcgaaggagatcagcgtcggcggcacgtcgagatcctcgaacgaaccggacatggagtccttgccgccgatggcgccggcgcccaggtccacctgggccatcagcgcgccgagtacggcggccgccggcttgccccagcgttccggctcgtcgcgcagcttctcgaagtactcctggaagctcaggtaggccttctcatgctcgaagccggccgcgaccagcttggccagcgactcgaccacggacaggtaggcgccggtgaactggttcttggacatgatgtacgggttgaagccccacgccatcgccgaagcggtggtggtctcgccgaacaccggcagcttggcgaccatggccatgttcggggtgagctgacgcttgccgccgaacggcatgagcacggtgcccgcgccgatggtggagtcgaagcgctccgaaaggcccttgttggaggccacgttgatgtcggtgaccagcttgttcatgcgttcggccagcgtgccctcgccccacggggtctcgtaggactgctgttcctcgacatgcacggtctggtgcttggaagcgccgttggaggccaggaactcacgggacagattcacgatcttgtcgccgttccaggtcatcaccatgcgcgggtcctcggtcacggtggcaatcaccgtggcttcgaggttctcttcgcgggcgtaggccaggaactcgtccacgtcctcggcggccacgtccacggccatgcgctcctgggattcggagatggccagctcggtgccgtccaggccctcgtatttcttgggcacggtgttgaggtccacgaacaggccgtcggccaactcgccgaccgccacggacacgccacccgcgccgaagtcgttgcagcgcttgatcagacggcaggcatcgccgcggcggaacagacgctgcagcttgcgctccaccggagcgttacccttctgcacttcggcgccgtcgagttcgagcgattccacgttatgcgccttggacgaaccggtggcaccgccgatgccgtcacggccggtgcggccgcccagcaggatgattttgtcgccaggggccggggtttcgcggcgcacatggtcggccggggtggcggccacgaccgcacccacctccatgcgcttggccacgtagccggggtggtagatctcgtcgacctgaccggtggccagaccgatctggttgccgtaggagctgtagccggcggcggcggtggtcacgagcttgcgctgggggagcttgccttccagcgtctcggagaccggcacggtcgggtccgcggcgccggtgacgcgcatcgcctgatacacgtaggagcggccggacagaggatcgcggatgcagccgccgatgcaggtggccgcgccaccgaacggttcgatttcggtggggtggttgtgggtctcgttcttgaacaggaacagccagtcctcgtcgtggccgttcacgtcaaccttgaccttgacggtgcaggcgttgatttcctcggactcgtcaaggccggtcaggacaccgttcttcttgagccacttggcgccgatggtgcccatgtccatgaggcagacgggcttggcgtcacggccgagctcgtggcgcatcgccaggtaacgctcgaaggcggccttgacggtggcgtcatcgatggtcacttcgtccagctcggtgccgaacgtggtgtgacggcagtggtcggaccagtaggtgtcgatcaccttgatttcggtgatggtgggctcgcggctctcctcgctgaagtacttctggcagaattcgaggtcggccagatccatggccagaccgcgctcgtcgatgaacttctggccggcttcggcgtccatctcgttgaaaccggcgatggtctcgaccttgccgggcaccggcacctgggtcttcagggtttccttggtctccaggctggcctcgcgggcctcgaccgggttgatcacgtaatgcttgatggtgtccacgtcggcgtcggtcaggtcgccttccagcgcgtacagcttggcggagcggacggtcgggcgctcgccctgggagatgagctggatgcattcggcggcggagtcggcgcgctggtcgaactggccgggcaggaactcggtggcgaagaccttggcaccggcgaagtcgggcaggtcgtaggccacattgtccacctgaggctcgctgaacacggtgggcacggtctggtcgaacagctcctgggagatgccttcgacgtcatagcggttcacgatgcgcagggccttgaggccggtcagtccgaggatcgtgcgcagttcgcccgcaagctgctgggcttcgacatcaaagccgggcttcttttccacgtacacgcgaaaaaccatggaaatcctttcttgaaattaaagacaattggctcccctcgagaggggagccagataatgcattactcggcgacttcgatgccctcggacttggcgagttcggcgaggcgctcctcgatctcttcgtaggccgggatgatgctgccgagaccacggcggaacaggtccttgtcaaggtgctcgaccttgccggagtggtccttctggtcccacagacggcaggaatccggggtgatctcgtcggccaacagcagcgtgccgtcggtggcgcggcccatttcgatcttgaagtcgaccagcttgacgtcgatcttggcgaagatctcgatcagggcctcgttaatcttgcgggccagcggggcgatctcggcgagatcctcgcgagtgcatacgccgagggccaccaggtcatcgtcgttgacgaacggatcgtgcagatcatcgttcttcaggaagtactcaagtaccggctccttgagcggcaggccttcctccacgcccagacgggagcagaagtggccggcggccacgttgcgcagcacgatctccaacgggaacatgttcaccttgcgcaccagctggccggtgtcgtccactcgcttgataaggtggctgtcgatgccgcgcttcttgagcaggtcgaagatgatggtggtgatgaggttgttcagacggcccttgccggtgaagtcttccttcttttcaccatcgccagcggtggcggtgttcttgtattcgacccacagaacctcgggatcgtcggttgcgtacagttgcttggccttgccctcgtagagcttttccagcttctccatgactcacctttcaggagtggaatttctgggtgaactaacggtaaaagggtaccaatcgagggctacaacaacactcagcatgacgctacgatgcggccggcgcatcatacgtcgctgcatcgaacggccatacgctgttgggatggcggaggcggccgtcattggccagtacgatcagctcgtctccggtcgtgtagccttccggcatgaaggtatctgcagaagcgcgtgtgaatactcagatgttcgtcaatagacgaaacatgactcttcggccatatacacacgataatgggagtgacgaaatggtacaaggaggttcgtcatgatcgttcatccacgacccggacggcaataatattgaggccatgctgagctgatcaggccgtggactactccacggtaatcgtcaacgcatcggccacgaggccggccttggcacgggcgtcggcttcggactcgccgacggccagtgccacggccatgcggcggtggccatgcacttcgggcttggcaaaaatgcgcaggtccgtgccgggttcggccagagcagcggccacatcggtgaactcggcctcaccgtcgccggccaccacaatcgcatggcttgccgccaccgagccggccggaatcgtgagcgccacatgcttgggggtgatcggcaggccgagaatcgcgcgggcgtgcagcgcgaactcgctcagacgctgggaggccatcgtcaccataccggtatcgtgcggacggggggagacctcgttgaacagaatcgagccgtcggtgagcacgaacagttccacgccgaatacgccccaaccggtttcgccggccgcctgagccttggccaccaagccttcaacggcggtacgtgcgatgtcgcgcgcccgctcggcctcaccatcgggttcggtagccggctgccaggactcgcggtaatcgccggactcctgacgttggccgatcggtgtgcacgtcacaatgccggcggacgaagaaacagtcagtaccgtcagctcacgctccagcggggcaagcgcctcaacgatcacgcgcgacacatcgccctcatcggcggcgcgacggccctcctgcgcttcggtccaagcggcatcgatggcgtcggcggaacgcaccaccgactggccgtgaccagacgagctcatcaccggcttgaccacgcacggatagccgacttccgaagctccggcgcgcagctcttccagcgagccggcaaaacgatacggtgtagtcggcaagcccaattcttcgtgggccagtacgcgcaggcgctcgcggtccatgcaaatcgtggcgatttcggcgctcggcaccacctgggcgcccgcggccgcaacaccggccagcacatcggtggcgatggcctctacctcgggcacgatgatgtccggcttgatttcatcgaacaatgcctgcaattcggcggcattcgccatatccaacgcgcgatattcatgcgccacctgctgggccggagcgccggcatacgagtcagcggcgcacacccacgcgcccagtcgcatgagctcgatggccacttccttgcccagctcaccagcgcccaaaaacagtacgcgggtggggtgcttgcccagcggtgtgcccagcgggcggttggctgcgcgagttgcgggggagacggcggaagtctcggcgggaattgcgggagaggaggtggaagtcacggcagtatttacggtattctcagtcatacccacattctgccatgccgcgatgatttcgcctatgcggggctcgaattcggcgacgtgcgctgcggagcgcgtgattcaatattgggcaaaatgcggcagcccataccatttcacacgcgttcatgcagcgcggccgacgccattgcagcgcggtggtttaggatggggcaatgcgcgaaaacgggattgaagagagcattgatcgtcctctgactatcgctcttgtggtcgatacggtgggcaatcagggcaacggtacctccaattcggccttgcaatgggctgcagaattggagcggcaaggccatcatgtgaggcttgtcggtataggggcgcccgaatatccggcgcgcgtgaataaggtgccgctcgtctcgtgggtggccgccaagcagctcatgcaattcgccgaacccagcgacacgttgttccgcaccgccttccaaggcgtggatgtggtgcatatctatatgccgttcaaattcggccgtcgtgccgctaaagtcgcccaccaaatgggcattcccgtgactgccggattccacctgcagccggagaacgtgctgtattcggccggcccgctacgtcgcattcccggtatttccagcttcctgtactggctgttcaagcactggctgtacaagcacattgaccacatccatgtgcccaccgaaatgaccgcgagcctgttgcgcgcgcacgggtataaagccaagttgcacgtgatttccaatggttattcaccggtgtattcgccgaagaagccggccgatccggatgcctcggctcccgtgccgttccgcgtcatcgcttccggccgactggctagcgagaaagatcagattacgctgatcaaggcggtgtcgatgtcccggcacgccggcgatattcagctggtgatcgccggtactgggccgctcaagcagtatctcaagttccgcgccgggcgtttgctggcgcgcaaggccgatatcggattccacaagcacgccgatatgcccgatttgttgcgttcgggcgatttgttcgtgcattgttcgattgccgacatcgaatcggtgagcgtgatcgaggcgatggcgtgcggattggtgccggtgatcgccgcgtccgaactgtcggcggccagccagttcgcgctgatcgacgagtcgttgttccccgtgcgagacgcggccctgctggcccgacgcatcgattggtggatcgcacatcaggccgagcgcgccgaatggggcgagaaatacgccgaatacaccaaggcgcattattccgtggaagcctcggtccacaagttcgtggatatggaacgcaaggcgataggggaataggagccttctcgtttgcggagaggtctttccctcagtccgcctgcggtggccagctccctcatcagagggatctacgaaaaaacctccctctgatgagggaggtggcatcgcgaagcgatgacggagggagagattagcgaagggttttacaacaactcaataagttgatcgacctcttcaggcgtggtggcccagctggtgcagatgcgcatcacggtgtgcgtgtcgtcggccttttcggtaaagccgagcttgatctcgcgctccagacggtcgatggtcggctgatccatcgtcacgaaaatctggttggtgggcgcttcgaaagtgagcgtgtagcccttggcgcgcagggcctcgcgaatacgatcggccgcctcattggcgttgcgggcgatcttgaaatacaggttgtcggtgaacaaagcgtcaaactgcgcgcccagcacaaagcccttggccagcaaggcaccgtgctgcttgatgagggtcaagaagtgcttcggcgtgttgtgcttggtaaacaccacggcctcgccgaacagggcacccaccttggtaccgccgatgtagaacacgtcggcgatggtcgccagatccgcgagcgtcatgtctgagccggtggtggtcagcgcgtagccgagtcgcgctccgtccacgaacagcggcatgtcgtacttgtgcgccacatcggcgatggcctgcaactcggccttggagtagatggtgccatattcggtgctttgcgagacgtacacggagcccgggaacaccatgtgctcgtagttgccgtccgcatagaaggtcttgcagaactcgtccagttcggtcgggtccattttgccgttgtgctggggaatcgtgagcaccttgtgcccggagaactcgatggcgccggcctcgtgcacgttcggatggccggaggcgaccgcgaccacgcctgcatacgccggggtgatggtgtcgatgacgacctggttggtctgcgtgccgccgacgaggaaccacacatccgcgtccggctggccgcaggcctcgcggatcttggccttggcctgatcgctcagttcgtcggacccgtagcccgaatacagatggttgttggcttcagccacggcttcaagcaccgcgggatgggcggcgcgggagtaatcgttctcaaaagacagcatgacggaccttttgtccttatgttcggtgaattggatatgccctgagtgtacaacgcggtggttcccggcatgcctatttggcctataacccaggagcggggaattcagggagaaaaaacaaaacccttccgcgaacggaagggttttactggggtggccaacgcggctcgaacgcgcgaccttctgaaccacaatcagatgctctaccaactgagctatggccaccatagtgtcgtattcagcaagctgaattcgcgcaacaggtgaatactatacacaactttgcggatgtgtgctcatcggtgtgtcgcgatggaatcaagcggttggtttgctgatgcagctgctcgcttctcagtacgtgtccgtgccgactcagtccctgttcctcaacgccgtcaaggtggtgctcttcccgatcgccctcggtgtgatctgccacatgatcttcggcaagaagatcgagaaggttacggtcgccctgcctatcgtttctcaggtggctattctgcttatcatcggcgtggtcgttgccgccaacggtccgaagctgttcgtggccagctccctggtggccatcccggtggtcatcctgcacaacctgtgcggctactcgctgggcttcggcttctccaagctgatgtacaagatctacccgaagggcttccgctacgcacagcagaaggccatcaccttcgaagtcggcatgcaggactccgctctgggcgcaaccctggccctgacctccttcgcaaccaacccactcgctgccgtgccgtccaccttcttctccgtgtggcacaacatctccggctctatcctgtccagctggtggcgcaaccacgatgacaagcacgagatccactgggattccgacaatggcgagaagggctctgccaagagcaccgtttcagcggcccacccgttcgacgccgataaggccgccaaggtcgctgcctgaaatcctgaaatggtgagaaaggtcgggtaaggcacgactccagtcagtcggtcatccacctttcctacctcgcataacatagccgctcccgcttactcccgattgaggtatcgggcgtttcgcgagggcggttttgctataattggtaatgcagaaagcggcaaggtaatacggcaaagaggccgggtcgctagaggttcccatcggatatggaagagcacgaggatgtgctggaaacagataacacagaagcggatgtggtgaaaagaaacataatgtaacctccttggcggtgcccccgtgtgacatagtctccgcgggggcacctgctgtgtggcgttccctttttgcgacgcattcccgggaatattgcgttgggagaatagttgggtgtgtgttttgcgacgcattggaatattgcgttgggaggagaggaaaagtacgggggcgcaagaggtccccaaaccagtgagttgtggcccggcgcgtcgttgtccggaggaatcgtaatataggtattcgtgtgtgccagcagcacgccttatgtaacaggcgagcatgctgggatatccttcaaaccgctgatcgcacgcagtaatgcgccgacgggaggggcgaaggccatcgggccggtggactgggctatcttttccgattcgtcgggtgccgccaacaggcggataccaagcgagtgtgctgaaaagtgtgggtgcagtgcggcggtcacacaaaagcaagagaaaccactgaatcggagaattcaagttgcctactattgaacagctcgtccgtaagggacgtcaggcaaagccgaagaagtccaagactttggccctgaagggcagcccgctgcgtcgcggcgtgtgcacccgtgtttacaccaccaccccgaagaagccgaactcggctctgcgtaaggttgctcgtgtgcgcctgtcctcgggcatcgaagtcaccgcctacattccgggcgaaggccacaatctgcaggagcactccatcgtgctcgtgcgcggcggccgtgtgaaggatctcccgggtgtgcgttaccacatcgtgcgtggcgcgctcgatacccagggtgtcaaggaccgtaagcagggtcgttccctgtatggagcaaagaaggcgaagtaagagatatgtcacgtaagggaccttccaagaagcacgtcgtgctgcccgatccgatctacggttccaccgtggtggcgcagctcatcaacaagattctgcttgacggcaagaagtcgatcgccgaagacatcgtctactccgcgctcgatatggtcaaggagaagtccgaccaggagccggtggctgtgctcaagcgcgccctggacaacatccgtccgtccctcgaggttcgctcccgccgtgtcggtggcgccacctaccaggtgccggtcgaggtcaagccgaaccgcgccaacaccctgtcgctgcgctggctgaccgatttctcccgcgcccgtcgtgagaagaccatggctgagcgtctcgccaacgagatcctggatgcctccaacggcctcggtgcttctgtcaagcgccgcgaggatactcataagatggcagaggctaacaaggccttcgctcattaccgctggtaatcactcgccctgagtaaaactaaggaaaaagatggctgaagagatttcggacctccacgacgtccgcaatatcggcatcatggcccacattgatgccggcaagaccaccactaccgagcgtattctgttctacaccggtaagaactacaagatcggcgagacccacgacggcgcctccaccatggacttcatggcgcaggagcaggaacgtggtatcaccatccagtccgctgctaccacctgcttctggagccgtcagtcccacgacaccaaggacaagttccagatcaacatcatcgatacccctggccacgtggacttcacggccgaggtggagcgctccctgcgtgtgctcgatggtgccgttgccgtgttcgacggcaaggaaggcgtggagcctcagtccgagaccgtgtggcgtcaggctgacaagtacggcgttccgcgtatctgcttcatcaacaagatggacaagctgggcgcgaacttctactactccgtcgacaccatcaaggagaagctgggcgctactccgatcgtgatgcagttgccgatcggttccgagaacgacttcactggcgttgtcgacctggttgagatgcaggcttacgtgtggaacggcaccgaggagctcggcgccaagtacgacaccactgagatcccggacgacctcaaggacaaggctcaggagtaccacgagaagctcgtggaagccgctgccgaagccgacgacgacctcatgaacaagttcttcgaggacggcgacctgtccaaggaagacatccgcgctggcgtgcgtaagctcaccatcgccaaggaagccttcccgatcttctgcggttccgccttcaaggacaagggcgttcagccgatgctggacggcgttgtcgattacctgccgtctcctgaagacgtgccggccatcaagggctacaagcctggcgatgagtccgtcgagatcgaccgtcacccggtcaagtccgatccgttcgcggctctggtcttcaagatctccacccacccgttctacggcaagctcgtgttcgtgcgcgtctactccggctccgttgtgccgggcgactccgtgctcgactccacccgcgagaagaaggaacgtatcggcaagatcttccagatgcacgccgataaggaaaacccgatggaccgcgctgacgccggtaacatctacaccttcgtgggcctgaagaacgtgaccaccggtgacaccctgtgcgccatcgacgatccgatcaccctcgactccatgaccttcccggatcctgtgatccaggtggccgtcgaaccgaagaccaaggccgaccaggagaagatgggcatcgccctgtccaagctggccgaagaggatccgaccttccaggtcacgaccgacgaagagtccggccagaccctgatcgccggcatgggcgagctccagctcgacatcatcgtcgaccgtatgcgccgcgagttcaaggttgagtgcaaccagggcaagccgcaggtcgcctaccgcgagaccatccgcaaggccgtcatggaccagggctacacccacaagaagcagaccggtggttccggccagttcgcaaaggtcctgatgaacttcgagccgctcgacaccaccgagggcaagaccttcgagttcgagaataaggtcaccggcggccacatctccgccgaattcatcggccccatcgaggccggtgtcaaggaggccatggagtccggtgttctcgccggcttcccggtcgtgggcgtcaaggccaccgtcactgacggccagatgcacccggtcgattcctccgaaatggccttcaagctcgcaggttccatgtgcttcaaggaagctgccccgaaggccaagccggtcattctcgaaccgatcatgaaggtcgaagtccgtacgccggaagagtacatgggcgaagtcatcggcgatctgaaccagcgccgtggcaacatccagtccatgaccgacggtgttggcgtcaaggtcatcgacgccaaggtcccgctgtccgagatgttcggctacatcggcgacctgcgttccaagacccagggtcgtgccatgttcaccatggagatggactcctacgacgaggtgccgaagagcgtctccgaggagatcatcaaggcccagcgcggcgagtgacacgcgccactgcatgaagtagccagtgtcttcagtcagcggtaatatcgtataccgctgactgggttctggctcttcaaagtggcacataacccagaaacccagtagaataagcgagttcctgtgcgaaagggtgcaggaaactcacgagacgtccaggaggacaaaagtaatggcaaaggaaaagtacgagcgtactaagccgcacgttaacatcggtaccatcggccacgtcgaccacggtaagactaccctgactgccgccatctccaaggtgctgcacgaggagttcccggatgtcaacccggagtacgacttcaaccagatcgattccgctccggaagaggccgcccgcggtatcaccatcaacatcgcccacatcgagtaccagaccgagaagcgtcactacgctcacgtcgactgcccgggccacgccgacttcgtgaagaacatgattaccggtgctgcccagatggatggcgctatcctcgttgtggccgccaccgacggcccgatggcccagactcgcgagcacgtgctgctcgcccgtcaggttggcgttccgaagatcctcgtcgccctgaacaagtgcgacatggtcgacgatgaagagctcatcgagctcgtcgaagaagaggtccgcgacctcctcgacgagaacggcttcgaccgtgactgcccggtcatccacacctccgcttacggtgctctgcacgacgacgctccggaccacgagaagtgggtccagtccgttaaggacctcatggacgctgtcgacgactacatcccgaccccggttcacgacctggacaagccgttcctgatgccgatcgaggacgtcttcaccatctccggccgtggtaccgttgtcaccggtcgtgtcgagcgtggccagctggccgtcaacaccccggtcgagatcgttggtatccgtgcgacccagcagaccaccgtcacctccatcgagaccttccacaagaccatggacgcctgcgaggctggcgacaacaccggtctgctgctgcgtggtctcggccgtgacgatgtcgagcgtggccaggttgtggccaagccgggctccgttaccccgcacaccaagttcgagggcgaagtctacgtgctgaccaaggacgaaggcggccgtcactcgccgttcttctccaactaccgtccgcagttctacttccgcaccaccgacgtcaccggcgtcatcgagctgccggaaggcgtcgagatggttcagccgggcgaccacgctaccttcaccgttgagctgattcagcccatcgctatggaggaaggcctgaccttcgctgtgcgtgaaggtggccacaccgtcggctccggtcgtgtgaccaagatcctcgcctgattttcatcagacaagaatcttcgcttgaactagcgttatagaaaatccccttcgaggaaactcggaggggattttctataaccgcaacaggatatggatatgtaccacgacttccggcctggatgcgctagtgttgctttccaatagataaacggactgctgcactgcgaggatatgacactgatggcaggccgggaaagaaggtcgatgatgactggtgcacaggccgctcactgtggttctgtatccgcaatttcgctgggactgcccgtttccacggcgattcccgaagccaaaggcacactgccgaaagccttgttcgtaggcaaagcgccgatttccggcaaactcaagcagcgattggtgaacgagatcgaatccatcaccatgctggcgttggcccggtcggccaacacggggcttgcggacggcaaactgatcccggaagtgctggtcatcggactgaagcttacggccaaagccaccggcatatcgaacgaagtcatcgacctgatcgccggacagcgcaaatcgggcatcgtgttcgtgtgcgtacgcgacgtgccgttcgagggcagcacgcgtgaggaatgcgcgttcgccgtgcgccgcgccataccggggcgtgccgggcacacgccgatctatcaggtatatgccggcgactggcagccggcgggggaggcccagctggagctggccggctctactattgatgagctgtgggcatcgctgtgctcacagaccattttgggtacgccggaggtcgagaatctggatgcgcgcatcattcgccatactgaaattgctcggctcgaatccgaagtggacaagctcactcgtgaccatcagcgcgtcaagaacccggcccagcgcaacgagatctatgccaaactccacaaggccaaggcgcagctcgcaaaactgcgcgaggcatagtgatgtgaaagccattgggcttccgctggcgggagctggctcgcgaagcgagactgagggtggtccaggtccgtggcctagggctacgcccaagctaattgaaatattcgtgcatcatacagcgtacagttaaaccatgttccctctgctcgaaaccctggtcgccgtatacgaggtgggtcagttcacgctggccgccgatgagctgaaggtatcgcagtcgacggtgtcgtcgcgtatcgcccaattggagcagatggtcggcgcgccgctgttcgtgcgcaatgcgaaaagtgacgtgacgcccacacaggccgggcggatgctgtaccagactgccatcggcatcgacggattatggcgggatacgcgtgagcagatcgcccgcgtgcaggaggcgcgtgagccgctggccgtgtcgttctcgcacacgaccgcggcgattctgctgccgaaggcgttgccggtgatggctcgggacatggacggtttcgacttcgctgtacacgtgatgaactcggatgcgattctcgaacaggccagcatgaaggccgtgcagctcggcgtggtggaaaagccgatcgtgaacgattcggtggaccgcgtcaccctgtgcgaggaccggctggtgttggcgggggagcctgacggcgtgtggatggtgcgcgaacacggttccggcgtgcggtattacacggatctgtatttcaagaccgctcaggttgtgcctgcacgcacgatggaagtgtccagtaatgcggcgattgtggcggcgctgtccgccgggttcgggcagtcgttgatttcggaagccgccgtgccggcgggcgtgccggtgcagcgggagcttggcgatgagtttgtgcggcggttctatgcgctggtgccgagatccggtctgacgcacgatcagcgggagttggcggagacgattattgctgcgctgcgcgggtagtcagatagtcgactgaggggaggttgcgaacgttgtttctctccctccgtccgcctgcggcggccacctctctcatcagagggagatcaattaggtatcgacaaaatcgatgatatgtattggttgcaatgatttgaccgatgtaaacgcttgagcttcaatagacatcatgagagagttctgtacaaaatggtggaagcgcattgccaccgttgacatgctgttcattggtgttctgactctgctggcctcgctgttcgcctcctggctcaagcagttccccggattcagcctgttcggcgcgctcatcatcgcgctgctcatcggtatgatcatccagttcccgatccgcagtgcctacgtcggttccaatgatggccgcaaggcaggcgtcaaggacgccgctggcctgatttccaacaagctgctgcgcctcggcatcatcctgctcggtttcaagctcaacctcgccgtgctgttcacgcagggcatcaagtgtctgccgatcgccgctgtggtcgttacgctgaccatcatcgtgtgctatgccatcgcccgcaaactcggtgtcgacccgatgctcgccatcctgaccgccggtggcaccggcatctgcggtgcggccgccgtcatgggcctggccggttccatcaaggtgcctgaggacaagcaggacgagaaggacaacgacgtgaccatggccgtggccatcgtagccattatgggtactgtgttcgcgttgctggagatcgcgctcggcccgctgaccggcatgaccaaggaccagctgggcatcaccgccggtgcttccctgcacgaaatcgcccacgcggtcgcgggcggcgacgcgttcggcgcggtggacatcgccaccatcatgaagctttcccgcgtgctcatgcttgtgttcgcggccatcatcatcgccatctggtgggagaagaagcattccgaggttcagagcaccggcaagaagaccgtggccttcccgtggttcatgctcggcttcatcggcgcttcgattatcggcaccttcgtaccgttcgtcacctccatcaccccgcagctcgtggactttgcgtacatcgtgctcggcatggccatggccgcgctcggcatcaacgtgaacttcaaggccatcgcttccaagggcaagaagccgatgctcgccagcttcctgacatcgattctgctcatgtgcttcgcggcaggtgttgcgatgctgttcttctgatctgataagtgctctgaaatatgaataggaggcatatgaatgagtcatatgcctcctattcgttgtcatgatatgtcggtgcaatcagtcggcgcgatggtatccgcgttgactgaggatgttgtcgtgatgattgccatgagtgttctgcctagtcgttgaggacatcgcacgttgcatgccgatgatggcgaaggcgattaccaccatgattacgaacgccacagcgaaccagccccatagcagcacgaacagcgccatggaacgggcgaagttgcttgacgatttgaatgtcacgttgcggttcatcacgaagttgtaggtcgccgaacacaccacggcgataccgttggagatctgcgagggcacgccgatcaagtgcaggatggcgaacgtcgcatactccacaatggtctgcgtggcggaaacacccatatacttgcccaacacggcgagtccattttgcttcggggttgccgtgcccacggtattttccgcagtgttcgttgtggccgaggcattcgtgacgtccgcgccctgattgtgcttcacatccgctccattgttcgccatgcccatatacctcccggatgtacctgtgacgttcgacctcgcaatgataccgctgaccgcgtcgggaatcgtcgtggcggtcagacgagaaaaccgcaggccgcagcaacgaccggcacacccagcgacagcaccagataggccgttgccgtggggtagcggcgtttgtggaagagcgtcaccatttcgttgatcgcggtcgagaacgtggagaatccgccgaggaaaccggtggccagcaccagccgccacggttcatcaagtgtcccgcccagtgccagcgccgcaaccagaccggtcaggaatccggcgatgagattgatggtgaatgtggacagcgggaatgcgcgttgccaatacgttttgatggtcgcgtcaagcagatagcggcaggaggcgcctacgccgccgcacaggcagaccaagattggtaggaatacggtcatcacgccttacctcccttgctggtcgtagcggcattcgtatcagcggacgcttcggcggatgcgttcgaggagccggccagatgcgttcctgcccacacgccggcagacgcacaaaccagacccagcgcgaacgtcaccagtagataggcaatgccggccgccacctgaccgtcgcgaatcgcggtgaagccttccaatgccaacgtcgacatcgtagacaaaccgccgcatacgcccatgccgagcccacggctggtgagctccttggcacgcgtgtcgaaccgggaagagccggccaaataggcggtcagacccgcatagcagaagcaggccagcatgttggccacaaacgtgccggtatggaagctgccggctgcgggaatctgcgcgaacgcatagcgaatcgcggtgccgatggcaccgccgcagaagacgaccaacacaatatcaagatggatatcggggagcttgcgcgccggaggagtggccgtgcgcgtgcccggccgggcatctgcggatggggattgcgagcccataatagcctttcctgaaaccgctgaatcctgctgaagacacaacgattccatgcaatgtcaaatcgtgtgtaggaactatcagcagtgtgcggttcgaaacaagttcaggcgggtcccatcgccggttctccagattactcatggcgacgaatcgaacagtgagcgtatctcggatattggcctatcgcagtgaattgctcggttgttgccatacctcatgggtatggcgaaacatggtttatggctattggttaatgcaaggcgattattgtttaatagaacacgaggataacgggccttaagcgctcgatgccggaaaacaaggagttatgaacgtatgtctgaaaccatgaaagctgcgtttttcgtggagcctggcaagatgaccgtggaagaagtgccgaaggcgatgcttgaacaggatgatgacatcgtgatccgcgtggtgcgcacgtgcgtgtgcggctctgatttgtggttcttccgtgggctgagcggacaggccgcacacagccaggtgggtcacgagtccatcggtgtggtcgaagaggttggcgcggcggtcgaatccgtcaagcccggcgatttcgtggttgtgccattcccatacagctgcggcaagtgcccggtatgcaaggccggcttcgaatccgtgtgcccgcacggcggctacttctccgcctgtcaggccgaatacctgcgtgtgcccgaggcggacggcaccgtggtcaaggtgcccggttcaccggaagattattccgatgagcagctcgcatcgctgctgaccatttccgatgtgatgtccaccggttatcacgcggcggtttctgccgaggtcaagcccggtgacaccgccgtggtcatgggcgatggcgcagttggcctgtgcggtgtgattgccgccaagatgcgcggtgccacgcgcgttattgccatgagccgtcacgaggatcgcgcggcgctcgcccgcgaattcggtgcgactgatatcgtgcccgagcgtggccaagaggctattgacaaggtgctggagatgaccggcggctatggtgcggacgcagttctcgaatgcgtgggctccaagcagtccttcgacacggcgattggcctgattcgccgcggtggcgtgattggtcgtgtgggcctgccgcacgacgtggagatcagcgccgaaggcacgttctacggcaacatcggcatcaagggcggcccggctcccgtgcgccactatgaccttgatgagggtctgctggacgcggtgctcaagggcgagatcaaccccggccgcgtgttcaccgccgagtacgacctcgaccatatccaggacgcctacgaggcgatggaccagcgcaaggtcatcaaggcgctgatccggttctagggtcaggtgcgcagagaacggttctcactaagaaccgtgtgagccattcgcacaaaaccgcacaatcgaacaggccgccggtgtgatgggggagagattgggggtgagccggttcggtgcatgtttccataccgttgttttcgtgtagaatcggccatctctatacttctgttttcgtgtagaatagcatatgcctatactgttgttttcgtgtagaatagcatatgcctatactgttgttttcgtgtaatgaggtgattgctcatgttgaagcgcaagatgctggataagctgatcgcatggaaacaaaaagcgggtgggcgtgaggctcttctcatcgaaggcgctcgccgtgtgggcaaaagcaccattgtcgaggaattcggccgcactcagtacaagtcatatattctcatcgatttcacacgtttgccgcgcgacgttcgcgacatcttcgaaaaccagcgtgatgactttgacacatttttcatgctgttgtctgcgtattaccgcaagcgactgtacgagcgtgaatcgttgattattttcgacgaggtgcagcggtatccggcggcgagggagctcatcaaatatctggttgcggatggccggtatgactatgtggaaactggttcgctgatctccatcaagaggaatgtggcgaatatcgtcatcccctccgaggaacggaaaatggacatggggccgctcgattttgaggagttctgctgggccatgggggaggagctgcttgctgaaacgattcgcaaatcgttcgagcgtctggtcccgttgcccgatgcgctgcacaaacgagcgatgaggctgtggcgcgaatatctgctggtgggcggtatgccgcaggcggttgccgattatgtcgagcagcgcgattttggcgaggtggatttgatcaagcgtggcatcctgcagctgtacagtgatgatatcggcaagttcgccaatggcgatgccggccgcgtgcggggcattttcgctcagattccagggcagctgtccaagcatgagaaacgattcactctggcatcggtcgataagggggctcgatctcgtgaatacgattcggcgttcttctggttggaagacgcccgcttggtgaacctgtgccgtaattcgactgaccctttggtggggctgggattgtacgaagataacgattcattcaaatgctatatggcggataccggtttgctggtgtcgcaggcgtttgccgatcgagagacaacgccggatgatgtgtaccgggatattctgttcgataaactctcgctcaacgaagggatgctggtggagaatgcggtggctcagcaattccgggcgaatgggcgcaaactgtatttcttctcgcgcttggatagggcggatgcctcgaaaaccatggaaatagacttcctcatcgttcgggaatacgataatgccgcgatgaagcctcgcatcagcccgatcgaagtgaaatccacgaaacgatacggtgtgtcttcgctcgacaaattccgcaaaaggtatgcccaacgattgggcaaggaatacgttctgcatccccgccaactcgaagtggatggagaacgcatcaagctgccgttgtatatggcccactgtctgtgatttgtgctgattgatgcatgtttgggctgcaaggttcaggcagtcgaagagtgtccgttccgcataggacatccgtgaatatggctggactcacactggctcgactgcagggaaaggagttggcatgggatattccatcggtcaggtgtcgcgaaagactgggctgtccgaacatacgttgcgctactatgacggccaaggtcttttgcccggtatcgcttgaactggtttcggacggagatgcttcgatgacggcgatcttgaattgcttgatctcattgaatgtctgaaatccacgggcatgagtctcgcagagatcaaggattttgttgatatgactaagcaaggtgatgccacgctcgaatcacgacttgctgtttttcgcaatcagcgagatgtggtgaaacgtcaaatcgccgaattgcgacgccggtacatcaaacttgacgtggtcattacatccggtgcctcttgcacctcgtcgatgaaaatcaatatcccttatgggagtagcattttctgccttgtatgtgcagaatgccgcatttcaaaatggggttttggtgcaaaataccgcatttcaaagtagggtttggtgcaagatgtcgtgcaaatggtgaatcgggtgtgtttgtaggggcggctggatgactgtgcggctggactgttgtgtggccgcatgcttatgcggccacaagtcgtgcgggctgttcgcaaactatgcgcggtcggtcggcattcgcctgcgcttgaggtgttcgataagcagctcacactttttgacatcctcggcggtcgaggccggtaggtcgtcggaggaggtgtcgatgatgcgctgcaggtagccgtgtagggtttgtagctcggtttcattgagacagtccagcatggaggaggtctggtcgggcgctttgcccagcagatcggcggccttgcggccctggttggtgaggctgaccatcatgacgcggctgtcccgcctggatggacggcggctgatgtgaccgctggcctccagtttcttcaacagttcggccatggcctggcggctcatgccgaacatcgcggccaagtccttctggctggtctggtcggattccctgagcgtggccaagacgcggccttggccacggcgtgggtcgaaagcatgttcgccgcgcggcgatttggcgccgggggagacgagccgtctgtgtatcgcgcgatacgccatgatacggccaatgctgatgaaactgctgagaacatcgttcttgatatcgccgtcggcggtgtcgtggcttgtgccgttctccgccgattgactcgtggccattacgtcgtcgaccgcgtcgtttccggttacggcggcgttgttgctggtgctgctcatgttcggaatccttacgtcagtgctgcatgttgtcgccggtggattcgccgcgatagcgcatcatcatcgagcgctgcatctcctgcgcgttcggcggggtccaggtcagcgcgttcgcgccggccacgatggtttcggccatggactcgtcggtcgaaccgccgctggcgagcagcgggatggaggggtgacgctgcctgatctgctggaccacgtcaggcgtcctgcggccggccgccacgttgatgatggaggcgccggcctcgattttctcgtccaattcgtcatcgcaggtcaggaccgtggcgatgaccggggtgttcgtgatgcgcgccacgtcgtacaccgtggagggcggcgccggcgcgttgagcaccacgcccgccgcaccctgcatctcggccatcatggcgagttggatgacgcgcgggccggtggtggtgccaccgcccacgccgacgaacagcggggcctgggccgcggtgagtagggcctgggtgatgactggttcgccggtgaacggatatacggcgagaatggcgtcggcattggtgttgcggatgatggccgcgtccgtggtgaacgcgaacgagtggagttggcggccctggacggtgatgccggaagtgcagctgatgatgtcgggaacacgggccgcggaggagctgatgcggttttcgatggggttcggtccgtctacttgacgggattccgggtcgtattcggtgaggtcgttgctcatgtcatgtgtgatgttcatgccggtctcctttaataaggaagcgagcgaagcgtcgctggtcgtgtgtctttttcatcctcttcagtaattatgtcaagtacctgacagatatgagtatgcgactccatcaaagattgtcaagtaccttacgtattgctgttgtgtcgcatttttcgacaatgccaacatgcgtatgttgtttgatgcggatctgagtgtggaacggctgattcccgcactgtcgatcgagtccggaactaggatcactcccgaggatacgctcgtcattttcgatgaggtacaggaggtgccgagggcgatgacttcgctgaagatgttcaatgaagctgccccggagtatgacgtcttggccactggatcggcgcttggcatcgccatgcatcctgggttttcattcccggttggcaaggtcagtagactcaagctgtatcctatgtcttttgttgaattcctgtatgcgtgcaaacagtatgccttggccgaaatgcttgagtccaaggattctccgctaattaacgtaatgcatgacagggtcatgacttggctgcggtatttcatgtatacaggaggcatgccggagatcgttgaagcgttcgccagtactctgccgaatcctgacttcacggcggttcgtaaattgcagaatagtctggtctccgattatcgtgacgatttctccaaacatgttgatatgcgtgatagtcccgccgtcaccacgcttcgtctcaatcaggtatgggattcaattccttcccagttggcgaaagagaacaagaagttcgtatacggcgtggtgtgagctggtggacgtggcaaggattttgagagtgccatacagtggcttgtcgatgcgtcgttggcgttgcgcgcatccgccatcgcgcaagcgggaacgatcgcattcccggtcacgaggattccgctggttccgcctccggggatcggccggttggatgaggttacgccgtcttgagagccgtcgaacgatcagggccaaaggtaaagaaattcggtattcttgcaaggctttttgggttatcccgcgggcatgggtagactggcgtgcggtaggagagatactcgctgaaaggtgcatgccagctcatgggaacgggtgaccagccggaaaagaccaacaactaaaccagcgattgctgtcggctggccggtaatagccgtaactgcagcggacgttccccgctgcaggtgacacgcatcgccggagggcagctgcaagtccaggtaccggtccgcggccaccccagtcagccgcgctgacaacccccggcatcatacgcgatgtgcacgtcgtgcactgctacgtgccgtccgccgggctacccgtccagcgaaagcgtaaccgggcagctagccagtatcgatacatgtcataacgtaaggaagtagcccatgccatcacacgcacgcacggtcaccaggacaacccatcgcgttcgcaacgcgctgctcgtcgtactgctgttgctggtcgtgtgcgccgcggcggccggcttcagcggattcaaactgtacaagtcggcgatgagcgccaaagcgcacctcaacaatgtcgtcaacgcggccaaggtcatcaaggacggttccaccgacgacatggtcaaggcgctgtccgacgtgagctacatccagaaggaggcggccgccgccaagcaggatgtcagcggcggtctgtggacgctggcggagaagatgcccgtggtcggcggtgacgtgaagacggcgcgcaccgccatcggtaccatcgatgacttcgcgcagaccacgctgccccagctgggcaaggtcgtcaccacactgaccggtgccagcctctccagtggcgatgggcagctcaacatggagccgatcatcgctgcggcgcagcagcttgccacggtcgaccagtccgtgcaatcacaggccaggacgatccaggatcttcccgacgccaaactcggcgtggtgaacaacgcgctgcagaacggcaagacgcagatggccgccctggcgcaggtgaccgaaaacctgagcggcatgctcaacatgctgccgaacttcctcggtgcgaacggcgcccgcaactacgtgctgcttgcccagacgaattccgagatccgcggaaccggcggcctgatcggttcggccggttccttcagcgcggacaacggcaagatcgcggtgggggagttccacgcggatgccgagttcccctccaacgccgcgttggatgacgtcaaccaggacggtgacggcacgctgtacagcggactgtacttcggtcaagtcattcataatctttcgtccacgccggacttcccgcgcgtcgcgtccatggcccagaagttctggcaggcggctccgttcggcggatcgtccgacggcgtgatgtcgctcgaccccgtcgcgctgcaggcgatgatcggcgccaccggcgacgtgactctgtccgacgggcgcgtgctcaacgggtcgaacaccgccgaattcctgctcaacggcgcctacaaggaactgacgccctccgctcaggaccagtacttcagcgagaccgccgcccaggcggtcgcccacctgttcagcgacatgaacacgcagaagctcatgaccgtcgccaagacgatgctccggatggccgagcagcggcacctgtacttctggtcgttccacgaggaggatcaggcggtgctgcgcagcgccggcgtcaccggcgagatcaccaacgacgcgaagaacccggtgaccggcgtctactccaacgagatgcaggcctcgaagatggactggtacatccagcgcaagtcgacggtgaagaggaccggcgacaacacctaccacgttacgtattcgttcaccaacaccctgcagccgggcgaggccggatccctgccggaatacatcacggcgaacgccaagggaggcgtggcggtgaaccgcgtggtcatctacacgccggccggaggcgaggtcagcaacgtgtcggcgtcgaacggcagttccttcgcacaggtgcaggccaaggaccatatgacctacatggacgacatctccctggcgcctcaggacacggtgaccatcgaatacgacgtgaccaccgcggccggctcggccaacctcaaactggatcagacgccgaccatcggcgaccccgcgatcacgtacgagtattgatcggtattgatctgtgggtgtgatcttgggattgtgtgcccttatgaaagcgcgacgccgactcctctcggaacaggtgacgtgcttccggacgacgatgtccattacgatcacggcagatcgatagccgacaatatcgtcacgctggttcagctagttcgaattgcaggtggcggacggtgcccaagacgaaagattctcgtccgtcgttcggccgccgtcgttggccgtgatgatactggagaccatgaagctcaggcggcggcagccaagggcgaagtcgagaaagaggtgacggcgtgacacttgaacagaggtcagatagcgcggcggcggagcggtgccgagcatgaccaacaatcaacggccgcaggcgatcgaagtgcgcggggcgcgcgtgcataacctgaagaacatcgacatcgacattccgctgggcgaactggtgggcgtggccggcgtctccggttcgggaaagagctcgctggcgctcggcgtgctgtatgcggaaggttcgcggcgctacttggaggcgctgtccacgtacacgcgacgccgcctgacccaggccagtcgcgcccaagtggacgaagtactgcacgtgccggccgcgctggccctgcaccagcggcccacggtgcctggcatccgttcgacgttcggcacgatgaccgaactgctcaacagtctgcggctcctgttctcccgcgtcgcctcgcacgtgtgcccgcattgcggggcgcgcaacgagtcgacgctgaacgtggcggccggactgcccatcacctgtgctggctgtggcaaggaattccacgcgcccggcgccgaatcgctcgctttcaactcggccggcgcctgcccgacctgctccggaaccggcattgtgcgcgaagtgaaccgtgcggccctggtgccggatgagtcgaaaagtatcgacgacggtgcggtgctgccatggggctcgctcatgtgggaccttatgaagcaggtgtgcggcgcgatgggcgtgcgcaccaacgtgccgttcagcgagctcacgcccgaagagcgtgacatcgtattcaacgggccggccgtcaaaaagcatattctttacaagccgaagaaaggcgacgatttcgccgaactcgatttcacctacttcaacgccgtatacacggtggagaacgcgctcgccaaagccaaggacgagaaaggtctgaagcgcgtggctcgatttctcaaggagggaccatgcgccgactgtggcggcacacgactgagcgccgcagcccgggccccgcatgtgcgcgggctgaacctggccgaagccagcgcgatgaccttggatgcggcggtggattgggtgcgcggcgtgccggaatctctgtccgccgacatgcggccgatggccaccaacatctgcgaatcattcctggacgtggcccgccgactgttggatctgggcctcggctatctggcgcttgaccgcgccggtgccacgctttcaaccggtgaacgccagcgtgtgcagctcgcccgtgccgtgcgcaaccgcaccaccggcgtgctgtatgtgctcgacgagccgtccattggcctgcacccctcgaacgtggatgggctgctcggcgtgatgcatgacttggtggcggacggcaattccgtggtggtcgtggaccatgacgtgcgcgtgctcaaggccgccgaccatcttatcgaaatgggaccggttgccggcgccgaaggagggcatgtgatcgcgcaagggacggtcggcgaggtggcggcgaatccaagtagtcgtattgcgccgttcttggccgataatgtgagcgcgcgcatccgtgagcgcgtggcggaaccgcaggtgttcgaccttggccgcatccgcatgacaaccagccagttgcatacggtcaagccgctggacgttgatattccgcgcggccggctcgtggcggtgacaggcgtctccggctccggtaaaaccacgatggtgctcgaatcgctgattcccgcgctcaaagcgcaggcggcgggggagcggttgccggaacatgtgcgtgaacttgaggccgagggcatccatcgtgcgaatctcatcgacgccacgccgattggcgcaaacgtacgctccaccgtggccacctatgccgatattcacgacgaattgcgccgcgcctttgcccgcacggacgacgccaaggcgggcggctggaaggctggcgatttctcgtacaacaccggccgactgcgttgccctacgtgcgacggcaccggttcgatctcgctcgacgtgcagttcctgccggacgttaccatcgaatgcccggattgcggcggatcccggtatgcgcccgaagccggcgcgattcggcgtgcggttaaagcggctaagggcaaagcggcgaagatgaaggtcccggataaacgcaaagctgccaaggaaaaattgagcgaggcgacggatcagggtggcggcaacatttccctgagcctgcctcaactcatggcaatgagcgtggaccaggcgctgtccgtgaccggcgacctcaagaaggttcacgcacgtctgaccaccctgcacgacttgggcctcggctacttgacgctcggcgaaccgacgccggcgctttcgggcggcgaagcccagcggctgaaactcgccagtgaaatgggcaaggcccaatcggacgcggtattcgtgttcgatgagccgaccatcggtctgcacccgttcgacgtgcgcgtgctgctgggcgtgttcgaccggctcgtggcgagcggcgcaacagtcgtggtcatcgaacatgaccttgacgtgatcgccaatgcggactggatcatcgacatgggtccgggcggtggcgaaagcggcggacgcatcgtcgccaccggaacgccggaacaaatcgcggccaatccgaacagcatcaccgggcggtatctgcgctgactcgtatggcggtaacgcgcctttgcataggaccctgcgcgagtaggatagccgtccatggtgcagattcatggcattagacgcgcaagcgcggacgcgaaatatcggcagatgaccgggcagccggtcaagccgctgattctcaaactgtgtttgccggccgtcatctccaacttggtgaccaccgcctacaatctcacggacacgttctttattggtcagctcggcaccgcgcagtccggtgccatcggcatcgcgttctccatcatgaccgtgatgcaggcgctcggcttcttctttggcaacggcgcgggcaactcgatgagccgcgaactcggcaaacagaacaatgagcgcgccttccgactactggccgtgggcttcgcgggtgcggtgctctctggtttggtgattgccacaatcggattgctgaccctgcggccgctggtcgtcatgctgggatcgacctcgacaatcgccccatacgccgtgcaatacctgacgccgttgttggtcgccgcaccctgtgtatgcggttcgttcgcactcaacggactgctgcgataccaagggcaatcgacgttcggcatgatcgggctggtttcgggcgcattgctgaatttcctgctcgcgccgttgtttatcttcgtgctgcacctcggaatttttggtgccggcctggccaccgccatctgccagacggtgagcttcacgattctgaccacaatgagccgcaaattcggcgtgatgaaactgtccctgcgcaattgcaggccggatgtgctgctcatgcgcgaagtggccggcggtggcctgccctcgctgatccgccaaggcgccggttcgatttccgtgacctgcgtgaacattgccgccaatccgttcggcgatgcggccatcgccggcatggccattgtgatgcgcattatgttgggcgccaactcggtgatcgtcggcctcggccaaggtttccaaccggtgtgcggctacaactacggtgccggcctgttcgcgcgcgtcaaagaagggtactggttctgcgtgcggctcgccacctgcgtgctcgtggtgttggcggtgttgctgtgggtgttcgcaccgcaactggtcgagatcttccgctccgacccggccgtggtggcggtgggcgtggccgcgctgcacatccaatgctgcacggtgattctcaacggcttcaacatgatgggcaatatgatgacccagaccatgggccgcaccggcatcgcctcattcctggccctgtgccgacaaggtctgtttttggcaccgatcgtactgattctgccgatgatgttcggcgtgctcggcgtggaaatggcgcaatcggtgtccgacgtgctgacattcctagtcactatcccgttcatgcggcgaatcctgcatgaattgcggtgaatggtagatggcaactatgaataatcgaagtgcaaagcgggtgccgagcgtcccctctcccgcgtatatcgaatcgctgtaccgcaccatggctgccgcccttggcccgaccggatggtggccggccgagactacgttcgagatcatggtgggtgcggtgctgacgcagaatacggcgtggggcaatgtgaatcgttcgcttgcggcgttgaacgcggagggtgtgctcgaaccccataagctggcgattatggggccagcgcatctacaggaacttattcgcccgtccggcttttatgtcaacaaatccaagacggtacagtcactgagccgatggtatgtggagcgttgcggagcctcgcctgagggcgcggcagatattcccgacgccgaattgcggaccgaattgctcggattatttggtatcgggggcgaaacggccgacgacctgatgctatatgtgttttcgcgccgcacattcgtggccgatacttatgctcgccgactattcgccttcctcggatttgatgcgccagccggctatctggcattccacaaggcctattcgcccgtggtgctggatgcgagcctcagcgtcaaggatttgcaggaattccatgggctcattgacgagttcggcaaggcctaccgcgatgacgcggccaaaagcgagtcctttttgggtggatggagggcttgactgcacggcgaatcgttctcaataagaaaagtgtgaggcccgcacggtgccaatcgcacatctgaatccttgactggctgcgctcgatgctgggtgtcgaaaacgagtctgtgacagaatagttcgaccgacacaatcgccaaaacgccgaacaggagccaatgatgaccgaagacaagccgatcgccaagccgattatcgatgatgcgacgcgcgagaaaatggcgcttatgttctctggcgaggtctacctgccggatgatgtggacggcttttttgatctgcaggccgcccagcgtgatctccagctcgaactcaacgccacgccgctgaccaacccgaagcgccgtaccgaactcatgcaggcgttcttcggcgcggcgggggagggtctgtacctcgaatgcccggtgtatgcgaactggggctgcaatacttattggggcgagcgctgttacgccaacttcaacctgacgctggtggacgatggtgagattttcatcggatcccacaccatgatcggccccaacgtcacgcttgtagccaccggccatcccgtgcgtccggacctgcgctatcagggtgcccagtattcgttgccagtccacatcggcgagaacgtctggatcggcgcgaatgtcaccgtgctgcctggggtcaccatcggggacaacgcggtcattggcgccaactcgctggtcaccaaggacatccccgccaacacggtcgcctatggcagcccgtgcaaggtaattcgcgaaatcaacgaacgcgacgacgtctactactggcgcgaccgccaattcagtgagcgttttaagctcaaagagcagtagcgcgaaagctcactcccacacgtcgagcttgcgatttttgtagaaatactcgcggtccttgtcgccgatttcacgcacgacctcgcagggcgcgccgtaggtgacggagttggcggggatggaatgtgtcacgaccgaaccggcgccaatcacgcaattgtcgccgatggtcactcccggcagaatcgacacgttcgcgccgacccacacgttgcgcccgctgatcaccggaatgcaatacgtgtaatggtgctcgcgcagcaccggcaacacggggtggccggcggcgcattagcacggggaacggttgaacgagaagtggattggcatgtgatggtatcgaacatactgatgcgtgtgccgccgagcctgtccagatggctgcctatatgaaccagtgacagaaaagcacgggaacgcgagcgagaggagtgtgcatggggcagttcggcgtcatgattggccagttagtcggatttctgatcatgctgatggtcgggtatggatgtgtgaggcttcgattctacggtcagacggcgttggacggcatgtgctcgttgctgctcaacgtgctcatccccgtgcttgtgttttcgaacgccgtcgatggtgcggaccgcgcgcagcttgcctctaactggggcgtgatgctgctgaccgccgtgatgtacgcgctgctcatcctggtgttctggctggtcgccaaactgttgcggctcaaaggttcgcgtagccatgtatttcaggcggcgctggttttcggcaacgccggattcatcggcattccgttgattatggcactttggccgcagaacggcgcgatttacgtggcgctgatgtcgatcatcgaccagacgctgctctggacgtacggcgtatggctgtgcgagccggtcgccgaaacgactggcggcaacgcgattggctcgcgaggtgcggtcgcgaacggttcggtgaacggcgccggttcggtgggcaatgctggttcggcgagcaatgccgcaaacggtggttctccggccgtcgtccgcccctcgccaggcacccgcgtcctcggcctgcttaaacgattcgtcaatcccgccttcgtcggcgtgatgctcgccctgattctgattctgctcggcgtcaaggtgccggacatcatcctgaagccgctgcaccccatcggcaatatggccacgccgatgtcgctaatctacttgggcggcctgttcgcgctgaccaagtggtggggcgtcctcaaacgctacgaactctatgctggcctagtcgccaagatgatcgcattcccgctcgccttctacgcgctactgaccgcgctgaccggcgcattgccgcaactgccgatcacccatgacatggtgctgatgattacggtcatcgccggactgccgaccatgaccaccattgccatgttcaccggtcgcaagaacaacatgcccgagtatgcggtcggcttcgtgctcgtaagcacgctgttctcgctggcctccctgacgattgtgtcggcagttgtgttctgaattgtccccttcgacgaaaagaatgccgggggcctccggcgcttggaatttcatcgacgccgccaacgactcggcatccgaggcggccgtgccgtatttcaaggagatattcgattacgcgcgcacgctcgatccgcagcatcgtcctctgacctacaccaatctgatgatggccgccgcaggcaaagacaagtgccatcaattcgcggatgtcatctgcctgaaccggtattacggctggtatatgcaaggcgggtatcagctcatcggagccaagaaggccttcatcgacgagatgaaccaatggatgaacaccgaacccaacaagccattcctgttcaccgaatacgttgcggacaccgatgccggtgcgcacaagctgccaagcgtgcagtggagtgaggaataccagtgtgagtacctcaccatgcagcacgaagtgttcgacatgttcgaggcagtggtgggcgagcaggtatggaacctctgcgacttccaaaccggtgaaggcatcatgcgcgtcgacggcaacaagaagggcgtcttcactcgcgaccgtcagcccaaagccgccgcctatgtactcaaggagcgttgggagactaagtagcggcccgcccctggaatattccaggagcaacgcacatcgcataacacacaacgcaacatacaaaaaagaacctcgtgaaacgaatttcacgaggttctttctagttacgctgaatgactcccattagactcccacgagggaagagcaatgggaattccaacgtggctaagctctcaaactcagatgtggaagtagagctcgtactcgagcggggtcggggccaggcgagcctggtcgatctcgtcgcgcttgaggccaatccaggtctcgatcaggtcgtcggtgaacacgtcgccggcggtgaggaagtcgtggtcctcttccagggcgtccatagcctcagccagggagctcggcacctgcttgatgccggcgtgctcttccggcggcagctcgtagaggtccttgtcgaccggctccggaggctcgatgtggttcaggatgccgtccaggccagccatcagctgagcggagaaggccaggaacgggttgcaggacggatccggagcacggaactcgatgcgcttggcagccggggaggtgccggccagcggaatacggatggcggcagaacggttacgagcggagtacaccaggttgaccggagcctcgaagcccggaaccagacggtggtaggagttcagggacgggttggtgaaggccagcacggaggaggagtgcttgatcagaccgccgatgtaccagcgagccagatcggacaggccagcgtagcccttctcgtcgtagaacagcggcttgccgtccttccacagggactggtggcagtgcataccagtgccgttgtcgccagcgatcggcttcggcatgaaggtcgcagccttgccggccagagcggcggtctcgtggacgacgtacttgtacttcatcaggtcatcgcctgcgtgctgcagggtgttgaagcggtagttgatctcctgctgaccagcgccggccacctcgtggtgggaacgctcgagaatcaggccgaccttctgcaggttggcgaccatatcgtcgcgcaggtcctgagtgtggtcaatcggcggaaccgggaagtagcccttcttgacgcggttcttgaaaccgatgttcggggtgccgtcttcctcaacgtcaacaccggagttccacggagcttcgatggagtcgacctcgtagaaggagcggttcatgccgttctcgaagcggaccttgtcgaagatgaagaactcggcctcaggagcgaaggaggcggtgtcggcgataccggtggacttcaggtaggcctcggccttgccagcaacctgacgcgggtcgcgggagtacggctcgtcggtcagcgggtcgacgatggagaaggccacgtcaagggtcttgtgcttgcggaacgggtcaatgaaagcggtctcaacgtccgggaccagcttcatgtcggactcgttgatggcttggaagccctgaacggaggaaccatcgaacggcatgccgtcggtgaaagcgtccttcaggaattcgctagccggcacggtgaagtgctgctgaacgccgataagatcggtgaaacggacggagacatactcgatgccttccttgttgataagggcctcggcgtcttccttggacttgagttcggtcacgggaccgctcctttcgtatgaaatataacggtatctatcgtaaaatcgagcgtttcgccggctcgaaacttgggttacgagaatgtttcgtgactgtggccgacaatcgcgcaggcgcgttatttcaacgaaacatcattacagaatggaaacggaggctatcgggggagtgggtagaggtgtccgcaacgtggacagtggatattgacaggtgacgtaggtggatgtatgtggacgcgattatgagacatatgacgaagccccggaaccgattgaacggattccggggcttctgtgcgatttggtggtgtgctgccgatcagcgaccgcgcatcgcgcggcgggagatcttctgcgggtggttcgggtccatgcccttggggatggcatagcccttcttggcctgcagcgtgcgcagacgatcgttcagcgtttccatctcggccttggtcagcaggaagcgacgacgcggatgaatcttggcgatcagtgcgttcttgtggttcgtgggctcatagctcttggacttggtcaccgtgctacgcagcttgtccagtggcacctgcttggggccgtggcccacggagatgcggtacaccggaatggaggagccggcggtgacgcccttgatatcgtgttcctgacgatccatcgccttcatgatgcgaccgtattcgccttcgccgatcaggtagatgccgttcatcgaagtgccgcgccagatggcatccttggtcttcgggtcgatccacaccggttcctgcgggaagtcaaagccggctttctgcatgttgctcagcacgccgatggcggcaccaggcttgccgtcaatctgcttgtagccgactgcatccgcgcggcgggtgagcatcatggtggccagtagcatgccgagcatgatggcggtgatcatggtgaagatccaggtcagccaggtccacttggcaatcagaccgatgatgatcatcacgactacaggcagcaggaaagcaccggcctcaagccacggcagggccttgtcttccttagccgtgtacttgtagatctggatgatctgcttgattgtgctctgcttcttcggcttcgcgtccttttccgccatcacttcttcctttgttgggacgaaacacactagacaacatcttatcaggtgcgctggtccgaacttgtttgtgctggttggtctcagcgtgtgtgtaacggccgtccgtcggccttgagcagcgcctcgccgagcgtttcactgaacgtgggatgcgggtgaacgaggcgggctgcgtcggcgagcggcacacggttgccgaccagctgttcggcttcggcgatgatgtcggaggccatctgggagaccatgtgcacgccgagcacgcgcggggtgtccgggttggtcgcgtcgcagccggagacgatggtcagtgaaccggccgtgccgctcatcagcatgcgcgcgttcgccagcatcggatagttggtctccttgatttcaatgagatcctctctcgcctgcgcctgttcgacggtgagcccgaccgacgccgcttcggggaaggagaacacgatttgcggcacggtggcttcgtccaccggcttgggattgagtccggcgatggtctccgcgatgacgatgccttgctcaaaagcacgatgcgccagcgcgtgaccggccgtcacatcgcccaccgcccatacgcccggtttgtcggtgcggccgtacgcatccgtggcgacatgtccgtggtcgtcaatcgtcacgccccatgctgggtcggtgatcgggtcacgcccgatggcgacaagggcgatttcgccccagacgctttgttcgccgtcctggccttcgcgcgtgtagtgcacggtggcaccaaggttcgcgccggtgtccacatgggtgacgctggcgcgggtgatgatgttcacgccatgacgtttgagctcacgggtcagcgtggtgccggctctccggtcccaggctgagagcacgcggtccttgcgaatcagcaaggtcaccttcgaaccggcggcgttccacatcgaggcgaattcaagggcgatggccccggcgccgataatcaccgccgaagagggaaattcgttgacttccagcgcctgtgtggagtcgatgagggcgccggcgaacgggttaccgggcaatgggcgtggcttggcaccggtggcgatgacgatgttcgtggccgtgaggtccatcgtggggccgctgggctcggggacatcggccttgtgataggtgaggatgtcgctttggtcgggggaggggacgaggtggacgatgtggtcggaagttgctggagcggtctcatccgcatggaacgcggcattggctcggaacacggtgatgccgcgatgggcgagcagtccggccagtcctcccaccatcgtcttgaccacgcgcaggcgatagtcgcgcagcgtgccgaagtcgatgccattcaccgaggcgttgacgccgagttcggctgcacggtgcacggtgtcgatggtgtgggtggcggtgatgagcgccttggaggggatgcagccacggttgagacatgtgccgcccacggtggcgtcacgctcgacgagtgccactttcatgccgagttcggcggcgcgcagggccgtggaatagccgccggggccggccccgatgatgaccagatcaaactgttcgctcatgattgcctccttgatacatataagtatggctcccatgctagggagccatatgcggctatcgccgccacttcgcctaaaaaccgtccactggactgttttctttacggctcagcccctcaacgaggggagccagagtatatatggacaatcagtctgccggccagtgaccgcgcttcgggtaacgcggcttgggaagcctccaacgacgcatctgaatcgaacggctccaagcgtaggagaaggagcgggagcccttggacacggaccgttcgccgtacttggcgatgagcttggccttgagcttgcgccacatcagccatacgtcgatgatcacggcaatcaggtaaccgtacataagcgccatcatgatgatggaagcccactggttctgcatcaaagaagtgacgaacatggagacgatcagaatcgcgaaggccaccgggatgaaccattcaccaaggttgaaacgggcatccacataatcacggatgtagatacgccaaggcaagcgttccgccttgggcatgtggttgatatcgccattctgcatcgcctcgtactcggcgttctccttctcacgcagacgggctttggcggccttggcgctggccctgcggtccaccggaaccagcggacggataccggcggcctgagcctgcttcatcttcggggtaggacggccttttttctcagaaggattggcggccttcttcggggcctgctcaacaggagcctggacctcttcttttttcttaaacggattccatgtcatgctttgaggttacggtgacgttcagacacttgtacactggcgcagccattgcaatgacgccgctcacatatatatataaaggaggaccatcatgacaacgctcactgctgacgagattcgttcgcgcgtcgaaaccgattggaaccgcatcgtcaaggtactggccgaaaaggtcgcgctgcagtcgatctccgccaagggcatcaccgccgaacaaatgaagcgctccgctgaattcgtggcagacgaactgcgcctcgtgggtgtggataccaaggtggttcaggcttccaatgccgacggcactccgggcgcatgggaggtcatcggctcgcatatcgtttctccggacgccctcaccgtgctgctctacgcccatcacgacgtgcagcctgttccggacccggccgagtggaacaccgacccgttcgtggccaccgaaattgacggccgcctctacggccgtggctccgccgatgacggcggcggtatcgccatccattccggtgcactgaaggccctgggcgacgacctcaacgtcaatatcaaagtgttcatcgaaggcgaagaggagatgggctcgccaagcttcattcccttcatcgaggctcaccgcgacgaattcgccgctgacgtgattatcgtggccgattccggcaactggtcggcggacattccttctttgaccacctcgctgcgcggcaacacctgtgtggacgtgaccgtgcagggccttgagcatccggtgcactccggccagtacggcggcccgattctcgactccaatacgttggccgccatgctcatcgcttccatgtatgacgagaacggcgatctggccgtacccggcgtgaccgcggaagagccgatcggcggtttgcagcacgaccttgacgaaaccaccgtgcgcgaggattctggcgtggtggccggttacgagttcgccggcaccggctcgctggcctcacgcctgtggactaagccgtccgtgaccgtgatcggcttcgacgcccacccggtcgagggatccttcaacgtgatcgccccggagacccgcttccgtctgtcgctgcgcaccgcgcccacccagcaccctgaagaagcgcaggaagcactggctgcattcctcgaatcccacgcgccgttcggtgccaaggtcactgtcgaacgcggcgaaaacggcatgggctgggccatggatccgaccgccgtggccaccaaggacgcgctggaagccatgaccgaggccttcggcgttgagcccatcaacaagggcgaaggcggctccattccgttcatccccgaactgcagcgcattttccccaacgctcaggtgctggtcaccggtcccgaagacccgaaggccaacgcccacagccccaatgagtccatctccctgcccggcctcaagaacaacgtgatcaccgaggctttgctgctggacaagctcggcaagtagccgaaccgcatcggtaatggtagtgagccgccgtcaggtaggtcacagatgtggctattgcctttgacggcggcttgctttatagtcgggagttgacacgggagctgccgttgggcggctgagaggagactcatagtctcgaccgatggaacgtgaccggataatgccggcgcacggaaatgtcgctcttacctacccgtgcctgaaccaacccgcgcgtggccacgaacatatgcatcatgtgcgtacatatatccacgtatgttcggcctgcgtgcgagcagaagaaaggcacattcatgactgaagctgtggccaaagccaattacaagtggcgcgtcgtcgatatcgtcgtcgccgcaatcatcgccgtcgcatccggcgtcattttctggggctgggacattgtctgctccgccccgctggccctgtttgaaggcgtgacccccggtttcgagggtctgctcaacggattctggctgttcgccggcccgctcgctgcaatcattgtgcgcaagcccggtgccgcactgtttgccgaaaccctcgccgccttccttgagcttacgctgggcaaccagtggggcgtcggcggctcgctgatcgtcggcatcatccagggtctgggtgccgaaattgccttcgccgtcttcgcttggaagaagtggaacatcggcaccaccatcctgtccggtgcgctcgccggcgtgggctgctgggcctactactgggccaccaacccgggctggaacggcctgcgcgtcacttggtatctggtgggctccatcatctccggcgtcgtgatcgccggcgtggtggtctggtacttgtctcgtgcgctcgccgtcaccggtgctctggagcgttttgaatccggccgcagcaaggcgcgcgtctgatgcagattaatccggctgcggtagaggccagcggctggggatggcggcacgccacgcgtaaggacttcgcgttgcgtgccgtcgatttcaccatccggccaggtgaacgtgtgttgctgctcggtgcttcgggcgcgggcaaaagcacgatgatggccggtctcgcaggcgtacttggcggcgatgaggaaggcgagcaggagggctcgctcaccatcgatggcgtcgatgcgcgcgaggcgcgaggtcgcgtgggactggtgcttcaggacccggactcgcagatcattcttgaacgactgggcgatgacgcggccttcggctgcgaaaacctcaacgtgccgcgcgaggagatttggcagcgagtgcgcgaatcattggatatggtgggactcggcggactcgaactggatcggtccacccgccatctgtccggcggtcagcgtcaacgtctcgcgttggccggcgtgctggctatgaagcccggtctgctgttgttggacgaaccgaccgccaacctcgatcccgaaggcgtggtcgaagtgcatgacgcggtcaaaaaggtcatcgaggccaccggacagaccatggttgtggtcgaacatcatatcgatgtatggctcgatctggtcgatcgcgtgattgtgctcggccgacccgatgcaagttcgcccacgggtgcggtcattgccgacggcaagccggacgaggtgttcgccgagatgggcgacgtgttggccgccggtggcgcgtgggtgccgggccgtgcgattcccgattactcaccgaagcaggagtctgcgcacgatgcgccggtgctcagcaccgagaacttaagctttggccgtggggccgctcttggcgttggtatcaatctggatttttatcccggcgaagtaacggctctgatgggtccgaacggcgcgggcaaatcgaccttggccttgaccttggccgggctactcaagcctatcgccggcaaggtgctcatcgccgacaacctcaagcccgcgcatgccgggcgtgagccgatcgactggaaaagcaaggaactgctgggccgtatcggcatggtgttccaggagcccgaacaccagttcgctgccaactttgtgcgtgacgaggtatccatcggccccaagtcgatggggcagagccaagacgaggcttatcagaccgccgaccgcatgcttgagcagatgaatctcacgcgcttcgccaaagccaacccgtacaccttgtctggcggggagaagcggcgactgtccgtggcctccatgctggccgccgcacccaaagtgttggtgatggacgagccgacattcggacaggatttcagtacgtggaatgaaatggtcaagctgatcgccgccatccgcgaccaaggctcgtgcgtgatcatggtgacgcacgatgaggcgctggtggatgcgctgggcgcacgacgtgtgatgttcgaggaggcgaaggcatgagtgacgtggtaaccgtcagcccgcaggaaacgcgcgtggagccggtcaaagcctcatcgccctcatggttcatcgcgcgcatcaacgcggtcagtcgcatcatcggtgcgctgttgctgtgcattccgatgttcatcagtctggatgcggtatccgcatccacggcgctcggcatcgaattcgtgctgctgtggattggtggcgtggctccgtggaccgtatgccgtaagacctggccggtatggatcgccgccgccggcagttttatctccgtgttcctctacggccgcacctcgggcgagatcctgtggcagggtggctggattgtgatcagcgagggatccatcaatctggccatcgccacggctatcagggtggcggccattgccgtacccggcgtgattctggccttgggcctcgatcccactgatttggcggacggtctggttgagattctgcacttctcaccgcgattcgtatacggcggattggccggattgcgcatgtttacgctgctgcaggaagattggcgcgcactcggcttgtcccagcgttcgcgcggccttggtgacggtaacgccatcgcccgtgccctctcccaagcgttcggactgctggtgctctccatccggcgtgccaccaaacttgccaccgccatggaagcgcgcggcttcggctccggcgccccacgttcccaagcccgcatctcgcgtctgaagcctatcgactggatcttctacgtcatctgtctggccgtcccgctggcctccataggcgtagccgtcggcaccgggaattggcacttcgcctttcagggtgtctgaaaggcggcagactggcacagtgcctttcagggtgtctgaaaggcgacagattagcacagtgcctttcaaggtgtctgaacgccttatgatgcccccgctggcgggggctgtcggcgtagccgactggggtggttccagcctcgaccaccctcagtctcgcgactgacgtaatgacccggcagtagggtagtggctatgcccatcaacgcccagattcttgataatccgaaatccgaccgcgtgcgccgcatcgccgatctgacccgcgccaaaggccgcgaacgttcgggccgttttcttatcgaaggcccgcaatccgtgcgcgaggccgtcacttggcggccggacgtggtgcaggacctgtatgtagaggtttcgcgggcgctggaacatccgcgtatcatctcctccacgttggagaagatcgtcgaaacctcgcaggatgccacgatttatgtgcactactgcaccggcgacgtgatgcgccgcatcagtccggacgcccaaggcatcgcggccgtcggcaatgccgagtccatgcacgccggagccgatgacgtcgaacttggcaagaacggtcgggccccgcagattgccgccttctggcaggtgcgcgacccgggcaacgccggcaccgtgatccgtgcggccgatgcggccggctgcgacgccgtaatcttcgtggacgactgcgtggacgtgctgaacccaaaggtcatccgctccaccgcaggctccctgttccatctgccggtactcgccatgagcaccgacgaattcttcacctggacaggcgaccataatatggacgtctgggccgccgacgtatacggcaccgaagaacgcaagccggaaagcctgcccgcagtactggcggacaaggcggcggtcgaggctccgaaagccgtgctgttcggcaatgaggcgcgtggcttggaaccggacatcctcacgcgctgcggccgcatcgtctccatcccgctttatggcaaggccgaatcgctgaacctcggcacctcggccgcggtgatgctgatgtcgctgtctatgtcgggtcatgttgaaagaatgtgaaaccggtaaaaacgctgtgaaacgctgagaaaacatcagacgaaagggttctcgtggcagaacaaatggtgttcgacgccgaccaggtgaccgctgaggttgccgagggcatcgagaaaatccagaacgcctccaacctggaggagctcaaggccatcaagacaacgtacgcaggtgccgattcggcgatgaccaaggccagcaaggccattggctccctgcccgccgaccagaagaaggaagccggcaagctcatgggcaagctgcgcgccgacttcggccgcgcctatggtcccaaggaggtcgagctcaaggaagccgccgagaaggccgcgcttgccgccgaaaccgtggatatgacgctgccggtgagccgtaagcctctgggcgcccgtcacccgctgcctaagctgatggaggacgtcgaggacttcttcatctccatgggctggcagatctcctccggcccggaaatcgaagccgaatggtacaacttcgactccctgaatttcggcccggaccatccggcccgccagatgcaggacaccttctacgtcaagggcaatcaagccaaggacgccgccggtttcgtcggctccaacatggtggtgcgtacgcagacctcctccgatcaggtccgtgccctcctgacccgtggagtgccgctgtacatcgcgtccccgggccgcgtgttccgcaccgatgagctggacgccacccatactccggtgttccaccagtgcgaagccctcgccgtcgacaagcacctgaccatggccgacctgaagggcgtgctggacaagctcgccgtcgccatgttcggccctgaagccaagacgcgcctgcgcccgagctacttcccgttcactgagccgagcgccgaactcgacctgtggttccccgacaagaagggcggccccggctggctcgagtggggcggctgcggcatggtgaacccgaacgtgctgaagtccgccggcatcgacccggacgtctacaccggtttcgccttcggcgtcggcatggagcgcacgctcctgctgcgcagcgacatcaacgacatgcacgacctggtcgaaggtgacgtgcgtttcgccgaacagtttgtgatgggggagtgattcagccatgcctatgatcgatatcgattggctcaaggaccatgtcgaggttcccgaaggcctgacctacgaacagctcgccaaggaccttgtcaaggtgggtcttgaggaagaggagattcactcctctcaggtgaccggcccgattgtggtcggctacgtggtcgacgccacccccgaaccgcagaagaacggcaagaccatcaactggtgccacgtggactgcggcgacgaatggaacgagaccgacgaagacggcaacaaggtgccgcgcggcatcatctgcggcgcgcccaacatgaaggccggcgaaaaggtcgtcgtcaccctgcccggtgccgtgctgcccggcgacttcaagatcgaaccgcgcaagacctacggccacatctccaacggcatgtgtgcctccgaacgtgagctgggtctgggcgacaaccacaatggcatcatcctgctgcgtcagtatggcttctccgaggctgaatacgaggctctgaagcctggtcaggacgccatgcacctgctgcacctcgaccagcctctgcttgagatcaacatcaccccggaccgtggctacacgctgtcctaccgtggcgtggcccgcgaataccaccactccaccggtgccgcctacaccgatccggccgtggcactcaacgagaaggccccggaacctgctgactaccagcccggcaccccggtggacatcgatgttgaaatcgacgataacaatccgattcacggcgtgcccggttgcgaccgctactacgcgcgtatcgtcaaggacttcaatcccaacgcccacacgcccaactggatgcgccgccgcctgatccgcgccggcatgcgctccatctccttggccgtggacgtgaccaactacgtgatgcttgacctcggccagccgatgcacgcctacgacctcgacaagctcgaaggcccgattgtcgtgcgccgcgccaacgagggtgagaaactcaccaccctggacggcaaggaacatgacctgagcgtcgaagacctgcttatcaccgattcgccgaacggcgaacgcggctcgcgcatcctcggccttgccggtgtgatgggcggcctgtatggcgaagtgaccgccgacaccaagaacattcttctggaggccgcgcacttcgatcaggtgaccatcgcccgttcggcccgtcgccacaagattccatccgaggcctcccgccgcttcgaacgtggcgtcgacaccgcgctgcagcctgccgccacccagatggccgccgaactcatggccaagtacggcaacggcgagcccagcgaacacccgaacgacgtgaacaacacgccgcgcgccaaggccatccacttcaaggcctccgaagtggcccgcgtagccggcctcgacgtggacatcaaccgcatctccgacatcctgaccgacattggctgcacggtggccggtggcggcaacggtgagttcgccgtaaccgcgccgagctggcgtccggacttgaacgagccgtgcgacctggtcgaggagatcgcccgactggtcggctacgaccagattccgatcaccgtgccgccggcaccggtcgagggtctggtgggcctgaccccggaccagcagcgtcgccgtcgcgtggcggacgagctcgccgagttcggcatggtcgaatcgctgagctacccgttcgtgggtgacgacgattacaaggccttcggcttcgacccggaagccaccaagaaggtcagcgtcgagatcgccaacccgctctacggcgaccgtccgtacctgcgtcgcgagattctgccgaccctggccaccaccgtgcagcgcaacatccgccgcggcatcgaaaacgtgtccctgtacgagctcggccacgtctacctgtgggatccgaacgcgcccgccatcccggcactgcccggcggcgtgcgccccaccgacgaacagctcgccgcgcttgacgccggtctgcccgaacagcccgaccatgtggccggcatcctgaccggtctggccgaggacgacggctggatgggcggcaagcgcccggtcgactggtccgacgccgtcgaggccgtgcgccgcatcgccggccgtatcggtgccgcaatcgaactcgaccagcccgccgccgacgatgtgccagtccaatggcaccccggccgcgccgcccgcgtcatggtgggcgacgtcttcaccggctgggttggtgaactgcacccgcgcgtcaacgaggcgctcggcttcccggcccattccgcggccttcgagctgaacctcaccgcgctgttcgccacgctgaccggcaagcccgtccaggccaagccgatctccacgttcccgccggtcaagcaggatttggccttcaccgtggacgagaccgtgaccgcaggccagcttgagaacgtgattcgcaaggccgccggcgcgaacctcgaatccatcgaactgttcgacgtgttcaccggcgaacaggtgggcgagggcaagaagtccctggcctatgcggtggtgttccgttcaccgagcaagacgctgtccgccgaagacagcgacgccatccgcaaggccatcgtggctgaggccgccgaaatcggcgcccagctgcgcgcctgacccaaccaatcatccgaatcgaggagcgccatgagccaagcggagcaggacaagccgaaatacgggcagtaccagcagcctgaatatggtgctatgtctggccaatacgggccgaattacaacccgtatatttatggcgctcccgagccggatactaagaaggattccgccgcagccgctggcgataacggtggcgcggcacaatctcagcaggctggccagccgtatggtcagcagccggcgtggcccggcaatcagcaggcgggcggctggccgtacgctcaaggcggccaacagtccggtccgggcgcatatccgggcgggtacccgggcatgcagggccagccgtatggtcaacagccgaacggtcagcctcaccagccgcattattaccacggcatcgacctgaacgatccaaaccagaacccactctacgggcactgggattcgtatgcgatcatctcctttatcctcgccctgttcttcccggtgccagtgctctcggcactgatgggcgcggtggcaatgtggcgcacgcgcactttccatatgaagggcttcggtttggccgtggccgccgtggtaatcaacgtgctgtacaccatcgccgtcatctggatggccttcaatggctatgacgccatgagcctttaccaggaagccctccagcaactgaccggcggcaccggctcctcctccgactccatctccgcataagtagcgttcacataccaacacacccactgcataaatatgcaatagtctgcataatcgcgtatactcatccgaagacacatcagtgaaaagagatgagtatggcgaaatatacagtggccgtggccggtgccacgggctatgccggcggtgaagcgctgcgcattctggccgcgcaccccgacttcgacatcacctgcgtggcaggccattcctcagtgggggagtcgatggccaagcacatgccgcatattccccaactggccaatctggtcgttgaagataccacgcccgaagtgctgaacgggcatgacgttatcatcctcgcactgccgcacggtgcttcgggcaagctcgcctcgcagctcgatccgaatgccgtggttgtggatttgggcgccgaccatcgcctcgaagaacaggccgcttgggatgagttctacggcggcgatttctatgagcattggacctacggcatgcccgagctcatcaccggcaaagctgcggacggctcctacacccgccagcgtgcggcgcttcctggcaccaagcgcatcgcaggtcctggctgcaacgtcaccgccaccacgctggccctccagcccggcatcgccgaaggactggttgaatcgcaggatatcgtggccgatctggtcgtcggatactcgggtgccggcaagaatctcaagcgcaccaacctgcttgccgccgaggccctgcaatccgccctgccgtattcggtgggcggcaagcaccgccacattcccgaaatcctgcagaacttcgcccacgcggccggcaagagcgcggccgaagccagcgaattcacgctcggcttcacaccgattctcgcccccatgtcccgaggtatcctcgccaccgtgtccgcccgcatgacggacaaggccaagacactgagcgatgaggagattcgcgccgtatggtccaaggcctatgaaggtcaggacttcatggtgctgctgcccgagggcacgctgcccgccaccggcaacatcatcggatccaacgcagcccacctgcaggtcgtcaccgaccgcaaggccggccgcatctacgcttttgccgccatcgacaacctcaaccgtggtaccgccggacaagcggtccaatcactgaacatcgcactaggcctgccggaagacgcgggcctgaccaagatcggagtagcaccgtgagcgttacatttgcacaaggtttctccgccgccggcgtggcggctggtatttcatccgtcgaaggcaagaaggacttggccctcgtggtcaacaacggcccgctcgacgcggctgcaggcgtgttcacctcgaaccgtttctgtgccgccccggtgcagtggagccgtaaggtcgtcgccgacggtcacgtcaaggccgtgattctgaactccggcggtgccaacgcctgcaccggcgaggccggttacgcccagtccgtcgccaccgcggaaacggtcgccgggctcatcggcgccgaaccgaatgatgtggctgtctgctccaccggtctcatcggtgaactgctgccgttggacaacgtgctggctggtgccaagagtgcccatgaggctcttgccgccaccgccgaagccggcaccgacgcctcccacgccatcatgaccaccgacaccaagccgaagacggtcgaactgaccggctccaacggctggaagatcggcggcatggtcaagggctcgggcatgattgccccgcagctggccaccatgctgtgcgtcatcaccaccgatgcggttgtctccgccggtcagatgcaggccgcactcgctgtggctgccgaacattcgttcaaccgcatcgacgtggacggctgcatgtccaccaacgacacggtcctgctgctcgcctccggtgcctctggcatcgaaccggacaaggacgaattcaacaagctggtgcgtgaggcctgcgcatccctgtcccgccagatcatcggcgacggcgaaggtgcctcccacgacatccgtatcaccgtcaccggtgccaccagcgaagacgcggcacttgcctgtggtcgtgccgtcgccgcctcgaacctgctcaagtgcgccatctccggcaacgatccgaactggggccgcatcgtcagctccctgggcactgtgccacctgaagtcgcgccttacgattcgaacaaggtgaccgtggacgtcaacggcgtgcgcatctgcgagaacggcggtgccggccgcgaccgtagcgaggtcgacatgaccccgcgcgaagtccacattgacatcgacctgaacaccggctcggacgccgaggccaccgtctggaccgacgatctcacccacgaatacgtccacatcaacgccgactacgaaagctgacaaacagcccagtgggctgtttgtagcagccggcagcgatagcgtcgccggcgtcgcagaaaagagaaaaattgtctacagaattgaagggacctgggttccatttcgacgtgcacaccgatttgcgcgccgatcagaaggcagaagtgcttattgaagcgctgccatggctggaggagttcgccggccagcgtatcgtcgtcaaatacggcggcaatgccatggtcgatgaccatctgaagcagtgcttcgccgaagacatggtctttctgcgtcaggtgggtctgcacccgattgtcgtgcacggcggcggcccgcagatttcccacatgctcaaggccctcggcatcaaatccgaattcaagggcggcctgagggtcaccacccccgaggccatggatgtggtgcgcatggttctgaccggcaaggtttcacgcgaactggtaggcctgatcaacgcgcacggcccgctggccgtaggtctgtccggtgaagacggcggcctgttctcggccatgcagcgcaggcccatcatcgatggcaagtccaccgatatcggcctggtcggcgacgtggtttccgtcgatgcttcggcagtcgaggatctggtggccgccggtcgtatcccggtcgtctcttccgtggctccgaacgaagaagatgccactgaagtgctcaacgtgaacgccgattccgctgccgccgctttggctgccgctgtgggcgcacacaagctcgttatcttgaccgatgtggatggtctgtacgccgattggccggacaagaattctctgattggccggatcggtgtggaaaccctgcgcgatatgctgccggacctggaatccggtatgcgacccaagatggaggcctgtgtcagggccatcgacggtggcgtgccccaagcccatatcatcgatgggcgcaagccgcattcgattttgaacgagatattcacctccgcaggcatcggtaccatggttatgcctgatgaaggactggaaatgaggagctcttatggctactgagcatgaggaaaaactaggtacggaagacagcaagtggctgggagagtactctcaggtccacatgaatgtgttcggtacgccgctgcgcgtcatggatcacggccaaggtgcccacatctgggatgttgacggtaacgaatacctcgatttcctggcaggcatcgccgtcaattccctcggatatgcccaccccaagtgggtcaaggcggttgccgatcaggctgccaaggtggctcatatcagcaactattttgcgtccgagccgcaaattgaattggcatcaaaactggtcaagctggctggtgcacctgaaggctccaaagtctacttcggcaactccggtgctgaaggcaatgaagctgccctcaagctcgccaagctgtatggacgcaccttgcctggtgccctgccttccatcggcggcaagcccgcacgcattctcgcaatgactcacggcttccatggccgtacgatgggtgcgctgtccgccacgtggaaacccggtatccgcaagccgtatgatccgctggtgccgaacatcgaattcgtgcgcgccggcgacaaggtcgccctgcacgacgcttttgcacagaccggtctcggtcgctatggcaagggtccggtggctgctgtgattctggaacttatccaaggcgaagccggcgtgcagccgttgggcgccgattacgtcaagttcgtgcgcgaactgtgcgatatcaaccacgcgctgcttatcatcgatgaagtacagaccggtatcggacgtaccggcaagtggttcgcattccagcgtgacgatctgtccggcggcgtgacgccggatatggtgactttcgccaagggtgtggcaggcggattcccgatgggcggcatgatcgctttcggcgagaaacttgcggctctgttcactcctggttcccacggctccacctttgccggcaatccgctgggtgcggctgcgggactcgccactcttgacgtgattgaagacgagaatctggtggccaacgccgaagctcgcggcgaacagctgcgcgatggcattatggccaccagtaatccgctgttcgtttccgtacgcggccgtggtttgctggacgccgtcgagctcaagcatccctgctcccacgcggtgatgaactactgcctcgaacacgggctcatcgtcaacgcggtggctcccaatgcgctgcgtttcgcaccgccgctgattgtaaccgcacaagacgtggaccaggcacttgccatcctcaaggatgtgcctacggacctgcccgacgactgatttctctctgtcactgccgacccaccgatccaaggagatcatcatgaccccagaacttcgccacatgctgcgtgacgacgacctcaaccatgaggaacagaagcaggtgctcgaacttgccatcaagttccaccacgaccgcttctacaagcagccgttcgccggtccgcaggccgtcgccgtactgttcgacaagccctccacccgcacccgttccagcttctccatcggcgttgccgagcttggcggctacccgctggtcatcgacaagtccggctcccagctgggccgtggcgagcccgtggccgataccgctcgtgtgctcaaccgcatggcttacggtgtggtgtggcgcaccttcggccagggccgcgtcgaagaaatggccaagtactccacccatccggtggtcaacgccctgaccgatgacttccatccctgccagattctcgccgacttccagaccatcgccgagcaccgaggcggcgtcgacaacctgaagaaccagaccatcgcctacctcggtgacgcggccaacaacatggccaactcctacctgctcggcggtgccgtggccggcatggacgtgcgcgtggccggcccctacggctacctgccccgcccggacatcgtggccgacgccaagcgcgtcgcggccgagactggcggctccatcctggtcaccaccgatgccaaggaagcggtgaaggacgccgattgcgtgttcaccgacacctgggtctccatgggcgaggaggccgaatacgccatccgttccaagccgttctgggattaccaggtcaacaccgaacttatggcattggccaagccggatgcgctcttccagcactgtctgcccgcctaccgcggcaaggaagtcaccgctgaagtgatcgacggcccgcagtccgtggtgtgggacgaggccgagaaccgtctgcacgcacagaaagcgttgctgacttggttgaccggcaaggcccgtggagacgaaagcctgctcgcatgagtgaaaccggtccgtccctgcagcgccctgccaccagggcggcgcggctgagtgccatagaacaggcgctcgccacgcatatcatcacctcgcaatcacagctgtccaaaatccttatcgacgagggcattgcggtgactcaggcgaccctgagccgcgatcttgacgagatgcatgcggtgaagacccggctgaaggacggcacggtggcctacacggtgggtcgcagcgtcgttgcttcagaaggtgaggatgtaggggagcgcggtgaggcacagatgtcccgcgtgctgaacggactggtcacctcggtggctgccgccggaaatctggttgtggtgcacacgccttccggtgccgcacaatacgtggcctcggtgattgacaagcagccgatcgaaggcgtgctgggcaccatcgccggagacgacaccgtcatggtgatttgcaccaatgacgacaccgccgtctcccgctccgactggctactaagtctcgcttccaaataaccaacacgccgtgcataaatatacagtcctctgtatatacttgcatcagtttgtttttcagaccttgaacgaaagggaaccaatggcagataacaagcgcattgttctggcctactccggcggtcttgacacctccgtcgccatctcgtacctgaaggagcgcaccggcaaggacgtcgtggccgtgtccctcgacgtcggccagggcggcgaaagcctcgagaccatcaagcagcgcgcccttgcctgcggagccgtcgaatcctacgtggtcgacgcccgtgacgagttcgccaacgaatattgcatgaaggccctcaaggccaacgccatgtacgaaggcgtctacccgctggtctccgccatctcccgtccgctgatctccaagcacctcgtgcgcgccgcccaccagttcggtgccgacaccatctcccacggttgcaccggcaagggtaacgaccaggttcgtttcgaggtctccattgcctccatcgacccgacgctgaaggccatcagcccgattcgcgacctgtccctgacccgcgacgtcgagattgcgttcgccaaggagcacaagctgccgatcacccagaccgagaagtccccgtactccatcgaccagaacgtgtggggccgcgccattgagaccggcttccttgaggatccgtggaacggcccgaccaaggactgctactcctacaccgacgacccggccttcccgccggtcgaagatgaagtcgtcatcgagttcaaggaaggcgtgccggtcaagatcgacggacgtgacgtcactccgctgcaggccatcgaagagatgaaccgccgcgccggagcccagggcgtcggccgcatcgacctcatcgaggaccgcctggtcggcatcaagtcccgcgagctgtacgaggccccgggtgccgtggccctgattaccgctcatcaggagcttgagaactgctgcctcgaacgcgaacagcaccgcatcaagcgcgacatcgacaagcgctggggcgagttggtctacgatgcgcagtggttctccccggcgattcagtcgctcaacgcgttcatcgaggacacccagaagtacgtgtccggtgagattcgcatggtcctgcacggcggtcgcgccgtcgtgaccggccgtcgttccgactcctcgctgtacgactacaagctcgccacctatgattccggcgataccttcgaccagaagtcctccaacggcttcatcgacatctacggcctgccgtcccgcgtggccgcagcgcgcgacgtcaagttcggcaacggcatcgaggtcccggagaacaccgtcgagtaattcttactcagtcgcccccgctgcgaggctgtcggcatagctgactgggagtggtctttgaaaggactgtcctcagtcacactccatgtgacagccctcgccagcgggggcaactgtatgtttgaacacattgctacgcttaaacacagctattttcacttttcaaggagccttcatgactgagaacaacgaacatctggccctgtggggtggtcgctttacgtctggtccgtcgccggaattggcccgactgtccaagtccacgcagttcgactggcgcttggccgacgacgacatcgccggttcccgcgcccacgcccgtgctctcggccgtgcgggacttctgaccgccgacgagctgcagcgcatggaggatgcgctcgacacgctccagcgccacgttgacgatggctccttcgcccccatcgaagacgatgaggacgaggccaccgccctcgaacgcggtctgattgacattgccggcgatgaactcggcggcaagctcagggccggccgttcccgcaacgaccagatcgcctgcctgattcgcatgtggttgcgccgtcactcccgcgtaatcgccggactcctgcttgacctcgtcaacgccctgatcgagcagagcgaaaaggccggccgcaccgtgatgccgggccgcacccacatgcagcacgcccagcccgtgctgctcgcgcaccagctcatggcccacgcttggccgctgattcgcgacgtgcagcgactgatcgactgggacaagcgcatcaacgcctccccgtacggctccggcgcactggccggcaacacgctcggcctcgacccggaggccgtggcgcgtgagctcggcttctcccgcgtgaccgacaactccatcgatggcaccgccgcacgtgatctcgtggccgaattcgcgttcgtggccgccatgaccggcgtggacatctcccgcctgtccgaggagatcatcatctggaacacccaggagttcgccttcgtcaagctcgacgacggctattccaccggctcctccatcatgccgcagaagaagaacccggatatcgccgagctcgcccgcggcaagtccggccgactcatcggcgatctgaccggcctgctggccaccctgaagggcctgcccaccgcctacgctcgcgatctgcaggaagacaaggaggccgtgttcgaccaggtcgatacgctcgaagtgctgctgcccgccttcaccggcatggtcaggaccatgcacttcgacggcgaccgcctggaagaggaagctccgaccggcttcgcgctggccaccgacatcgccgaatggctcgtcaagaacggggtgccgttccgccacgcgcacgagctctctggtgcctgcgtcaagctcgccgaaggccgcggccaggaactgtgggatctgaccgacaatgacttcatcgagaccttcgccgcgttcctgccggccgacaaggctccgggagtacgcgaagtgctctccagccacggttcggtcgactcccgcaacggcaagggcggcaccgcttacggtcgcgtgcgcgagcagatcgccgacgccaaggccgaggtcgaagaactcaagctcttccccgcatccacgtcggatggctccgcctacaaagcccccggcacgttctagtcccaatgaagctccctctgatgagggagctctattttgttgttgtcactgcaacggcatacactgagaaaccgtaacgaacgggagccgtgaggctgagaggaagtcgccagacttcgaccggggaacttgacgcgggtcatgccgccgtaaggaatcgttgtcgcagatttgccgggttctccgatacagctttcattccgtttgcataattcagccgtgagacggtcgtgatggagccaatacatcacagcggtcgaacggtcgcatgattgggttcatgaatgggcgcaccacttaaggtacggttcgtttcgtgcacccttttttactatctgaaaggatattatgcaggtcaacggagagcaggtcacgctcgagacgccggtcagcgtcgccgattatctcgaagcgcacggattccgcgccgagcgtgtggccatcgaactcaatggtgagattatcccgcgcgataagcgtgccgacgccatgctcgacgaccagtgcgtcatggaaattgtgcagtttgtacagggtggatgaaaggaaaagctatgagcaatattaatccggttactgaagcatctgttgaggcgactccgctgccgccgcagcccgccgtcaccaatccggtcggcaccgccgcgccgattctcccggtggaagacaagccgctgaacctgggcggtcacgagttccagtcgcgattcattctgggctccggccgctacgacctgaacctcatcaaggctacggtcgaacatgcaggcacgcaaatcgtcaccatggcactgcgccgcgcgcagaccaccgagaacagcgtgctcgactacattcccgaaggcattacgctgctgcccaacacctccggtgcgcgcaacgccgaggaagccgtgcgtatcgcccgactggcacgcgaagtgtgccacaccgacttcgtcaaggtcgaaatcgaacacgagaccaagtacctcttgccggacaacgccgaaaccatccgagccaccgaaatgctggccaaggaaggcttcgtggtcatgccctacatgttcccggacccgattgcggcccgtcagctggaggaggccggtgccgctgccgttatgccgctcggttcgttgatcggctccaatatgggcctgcgcatgcgtgacttcatcgaaatcatcatcgccaacgcgcatgtgccggtcatcatcgacgctggtatcggccgtccgagccaggcctgcgatgcgatggagatgggtgcggatgcggtgatggcgtacacggccgttgcctctgctggcaatatcccgctgatggctgaggcgttcaagcacgccatcgatgctggtcgtgcggcgtatttgtctggccttggcaaagtgaccgagggacaggctgtgccgtccagcccgactacggggtatttgcactgacacttttattagctcccctctctgaggggagctggccgcgtagcggactgaggggagatggaaacatggagaaaacatggcattgactgatgaacaggtggagcggtacgcgcgccatctgattttgaagggtgtgggggtcaaagggcaaaagcggttgctggcctccagcgtgctcatcatcggagcgggcggtcttggttctccggccgccctgtatctggcggcggccggcgtcggccatatcggactggtggacggcgatgtggtggatatgagcaatctgcaacgccaaatcatccataccactgcacgtgtcggagcgcccaaagtggaatccgcggccacagccatccgcgcgctcaacccggatgtgacggttgatacctactacgagctcgtcgacgcgagcaacatcgccggcctcatcgaaccgtacgatctggtgatcgatgccaccgacaacttcgccgcaaaattcctcatcaatgacgcctgcgtgctggccggcaagccgtatatccatgccggcgtggtcggattcgccggtcaggtgatgaccgtcattcccggcgaaggcccctgctaccgctgcatcttccgcgacctgcccgccgccggtgagattccgacctgcaaggaagccggcgtactgggcgcggtggtcggcgtgatcggcagtctggaggcgactgaggccgtcaagctgattgccggcgtgggggagccgctcgtggctcgcatgctcactgtggatgccctgaccatgaatattcgacgggtcccactgccaaagcatgtgccggattgcccggtgtgcggtgagcagccgaccattactgctattgatccggccaactatattcagccggcctgcgcgatttagagctatgtggtgcccctccttgaggggtgccaagatcagaacgagaggggaagaacatgcctattgctttgcataatgcggtcgatgacgatgagagcagtgaagcatcgtaccgccgcatcacgccggcggaatttgccaagctcgacccgaatacggtcacgctgctcgacttgagggaaccagccgacttcgccgcccacccggtcgaaggtgccatcaatgcaccactcgaccctctggcccatgtgctcaaaaccgtgcccacagatcgaactgtcgtagtctattgtgctcaaggatggtggagcgaggaagtagctgaaatccttgccgatcgcggctacgatgtagcaagcctcgatggcggttttcaaggttatctcgactatcttgaaacccaccacgattaacggttcccgttgtcgttcttttggatgagtgtgcacggacatatttgtgccctacaatcggtcacggtattactcgatggattcttgaatatcgccgggtaatcgtaattcacaacaggggattgcactgaaccaacccaaaacgggaaggaccgaaaatcgtgggacatctgctcacccgaacgcagattcaacgcctggtcgccaagcacggccgtgaggtcatcgagcatcgccacatgcagatcgaacgctgctgctaccagcacggcaatgtcaccacgttcgaacattccgtgcgtgtcgcctgcctggctgtgtggatggccgaccgcgcacacctgtggtaccgcgtcgacctcaaatccctgattcgcgcggccctcctgcacgattacttcctgtacgactggcacgactgggataacggcgaacaccagtggcatggcttcacccatggccacgccgccctggtcaatgccctgaaggacttcaagctcaacgatatcgaacgcaacagcatcgagaaccacatgttcccgatgaccccggtgccgccgcgctatatcgaaggctatctggtcaccttggcggacaaatgctccgccaccgccgagaccttctcgttcgaccggttcaacaagcgcgcgttgcccgccgcgaagccttacgccgagatcgaagcccgtcgatgatcatcacactcgaacattatttcctctggtttctgttctacagtttcgtcggctggatgtacgagtccattctcgtctcctgccaacagcaccgcttggtcaaccgagggttcctcaacggcccgctgtgcccgatctacggcaccggcgcgatactcggcgtcgccattctcggcaacgtacataacccgatcatcatcttcctgatttcgatggtgggcgccacgatactcgaatacacaacctcgtgggtcatggagcagctgttccacgcccgctggtgggattactcgaacttccgcttcaacctccaaggccgcgtctgcctgctgggcgcgttgattttcggcctcggcggcgtgggcgtggtacttggttcgcagccatatgtcgagcgggtcacggatatgattccgctgccgatgctgcatacgctggtcacggtactggccctgatcaccatcatcgacttggcggtcacggttgcgggcatgctcgaattcgagcgggtgctcgattccgtctctcaggtggtgcaggatgtggcggcacgcgccggtggcacgtggcagtggggctccagtgcggtatccgacaggatgcgtgagctttcgcaggatacggttgagcgtctgcgctgggccgtcaatggcgtcatcaacgcacagcagaagcgtatgctcaagtccttcccgaagttccaggtgccggatcgtcaggacatcatcgactctttgcgcgaacttatgggcccgcgccgctagaataaggcgttttactgaatcgcgcggctcggctggtgttcggcactgtcgccatgttctgcgaaacttgactgtgcccaattgggcagtcttattcacaattcgatagggagaagcgacaagctatggctcacgtcaccgacttcaaggaagcgggtttcaacaccctgcttgaggaactggaatggcgcgggttgatttcccagtccacggaccgggatcgactcgcagaagcactgaacggcgagcccatcacctattattgtggcttcgatcccaccgctgcatcgttgcatatcggcaacctcgtgcagctcatcaacatgcgtcacctgcagcttgcgggccatcatccgatcgctttggtcggtggcgccaccggactcatcggcgacccgcgccagtccggcgaacgtacgcttaacccgaaggacgtggtggccggctgggccgatcgcctgaagaatcagatcggcggcattctggacaccgaaggcgcgaacgccgtacgtttcgtgtccaattacgattggaccgcctcgatgaccgtcatcgacttcctgcgtgacgtcggcaagaacttccgtctgggcaccatgctcgccaaggacacggtcgcccgccgcctgaactctgaggaaggcatctccttcaccgagttcagctaccaggtgctgcagggcaacgacttcctccacctgtttgacgaataccactgcacgctggaactcggcggctccgaccagtggggcaacctcacctccggcctggacctgatccacaaggtgcgcggtgtggacgtcaacgtgttcaccagcccgattatcaccgatgcttccggcaagaagttcggcaagtccgagggcaacgccgtctggctcgacgccacgatgctcagcccgtacaagttctaccagttctggatcaaccgcccggacgtggagatggaaagcctgctgaaggcgttcaccttcctgcccaaggccgaaatcgaacgactggtcgaggaatccaagaccaaccccggcaagcgcgaggcccagaagacccttgcctgggaggtcaccagcttcgtgcatggcgaggccgctacccaggctgccatcgatgcttccggtgcgctgttcggccgcggtggcaacctcgaagacatcgacgaggaaacgctggaatccgtgctcgacggtttcaaggtggtcgacgagaacggcgagcacgtcttccccgtctccaagcccggcgatcgcgtaatcgacgccgcccaggctgccggactgttcaagtccgcttccgaggcacgccgcgccatcaagtccggtggcgtgtatctcaacaacaaccgtatcgaggatgaggagcaggtgctggccgaagccgacttcctggcaggccgcttcgcgcttatccgtcgtggcaagaaggcgctcggcgccgtggaaaaccgttaatcaacaacgaattaaggaaaacaagtaatggcagaaggtaacgagcgttccggcaagtcttacggcggcggccataaggggtatggcgatcgccgaccgggcaaccgcggcggcaagggtttcaagccgcgcggcaagggcggtttcaagccgcgtcatgatggtgagggtttcaagccgcgtcgccgtgaggatggcgagggctacgcgccgcgccgtgacggtgatggcgagggccacggcggctaccgcaagtcgtacggcaagtccggcggcttccacaagggcggccgctccggcttcggcggcaagggcggttaccgcggcaatggtccgcgccgtgacggcgaaggcttcaagccgcgccgcgaaggcggctaccgttcccacgaaggcgagaacggcgagaatccgcgctaccagcaccgtgataacgatcgtcgtgatttccgccgcgatggtgagcgtcgcagcttccgccgcaacgacgaccgccgagatttccgtagggacgaccgtcgcgatggggaccgtcgtgacttccgtcgtgacaatgaccgtcgtgacttccgtcgcgatgaccgcagggataacgatcgtcgtgatttccgccgcgatggtgagcgtcgcaacttccgtcgcgacgacgatcgccgtgatggcgaccgccgcaacttccgcagggacgaccgccgcgatgatcgtcgtgacttccgccgtgacgatcgccgcgacaacaaccgtcgtgacggcgaattccgcgagttttcgcaggaagagaagcgccagtaccgtgaggagaagcgctctgaatacatgaggcgcccgcgccgtaactccgacggcacgatgagcttcccctcgcagaacccgtacaccgaccgtcgtcccgacgagcccaagatgcccaagggcatggaatggtcgatgctgtccaaggatgagcgcgaacgtctgcgcggcctgtccaaggagcacgcggagaacattggtctgcacatcctcgccgctttcgcgctggaggagagcgaccccgaacttgccttggagcacgccaagtgggtggcccgtcaggcctcccgcatcgacttcgcccgcgagacgcttgcgttcgtggcctaccgtcagggcgactacaagctggccctgcgtgagttccgcaccgcctaccgtatgaacggcttcctcgactacctgccgttcatcgctgactgcgagcgtggcgtcggagagccgaagaaggccgtggaactggcgctgtccgatgagggcaagcagctgcatggcgctcccaaggtcgagatgttcctggtgtacgccggtgcccttggcgatttggagatgtgggacaaggccattgaagtggttcacaccgtcggccgttcccaggggctgccgggtgagtaccgcatgcgtgccgtgcaggccgagcagtacttccttgaagaggccggccgcagcaaggaagccgagcagctcaacgacctgctggaccgtcttgaggaccagtatgccgacgaggagattgacgaaaacagcgacgacgtggtgatcgatcacgatctcgaagacatcaccgacgactccgacgtgctcgaaaagctcggcatcgatccggatgaggcgcagtacgccccggatccggagcaggaatacggcgatgaggatgacgaggctgaagacggtgatgccgagtctgatgaggccgacgagaccgagaccgattccgccaatgactccgaggctgacgattccgccgaatccgccgactccgactccaccgaacccgaaaccgaggagtgaacggcgtaatgacccgtttcctcaaaggcaccgatcgcccgctcgccgaggcctatcagcttgcgctgctggacctcgacggcgtggtgtatcgcggcaagaatccggtcgaatacgcggccgattccattcgtgcggccgaagccgccggcatgaccatcgaatacaccacgaacaactcctcgcgcttccagcacgtggtggccgaccagctcaagggcttcggcttggacgtggagccgtggcaggtcatcacctcttcggtggtggccgcccgtatggtggccaaggcgttgcccgccggcgcgcgcgtacaggtattgggcgccgagcatttgcgcgatgaggtcacccgcaacggcctgaccatcgtggacggtcctcaggaccgcccgcaggccgtcattcagggctggtatccggatatgacttggcagatgatggccgatgccgcgttcgcggtcgaggccggagccacgtatttcgtgaccaaccgcgacctaacgattcctcgtgaactgggcatcgcccccggttgcggatcgatgattcgcgccgtgatcacggccaccggcgtcgaaccggtcgcctccgctggcaagccggaagcgtacatgtacgatgaggcccgcgaactgaacgccgccgaaggccacgatttggtgcccaaggaggcgtccatcgccattggcgaccgcctcgacaccgatatcgaggccggtaaccgcggcgactacgattcgctggcggtgctgaccggtgtcaccaacccgaccgaactgatgctggctccgtcacacctgaggcccacattcatcgcccctgatctgcgtgaactcggcgaagcccaaccggagccggtccgcgatgagagcggtacttgggaatgccgcaaggctagcgcttggtttgaaaacggccaggtacacgtcagcgaccccaccagtatggacggcctgcgcgccgccgtatgcgccgcatgggaagccgccgaccaaggcgcacagcttagcgaggccacggtaccggtgttcgccatcgaggcatagtcctatgcctacggatagcgaacatgcgccggtcaccgagcgataccccgaacttgcggatatcgatgaacaagacaacgaccgcaagcttgagacctatcgcaacgtgctggaatccttacaacacgagcttgataacagccgcagctagcagaggtgattcattctcccgccagcggaagatgacgtgaagtgctggatggtggctccatgccgagccaccccgttggtggatggtgggccgaaaggaagatatatgaccgagcagcatatcgatcccgcgactccacttgaccgacttgacatgatgctcgtggcttcgggactggtcgaatcgcgggccaaagcgcagcgactcatcaaggccgggcatgtgcgcgtggacggcgagaccatcaccaagccatcgttcatggtcaaagccgggcacagcgaactcgccgtggataagggcgacgactacgtctcccgaggcgcttacaaactcttgggcgcgttcgaaacctttgccggcaatggccttaccgggccggaaggcttggaatgtctggatatcggtgcctccaccggtggcttcaccgacgtactgttgcgcgggggagcggccaaagtcgtagcgctcgacgttgggcacggccagctcgacccgcgcatcgccaatgacgagcacgtcatcgaaatgagcggcgtcaacattcgcgaagtagaggccgacgacctgccttaccggccggcgatgatcgtttccgacgtctcctttatttccctgacctatgtgatcccggtaatcgcgcgcatcgcggctcccggtgcgcagattgtgttactggtcaaaccgcagttcgaggtcggccgggcaggactcggcaaaaacggcatcgttgaagatccggcattgcgggagcgggcattacacgacgtggtcgcctgtgctgaacagcacggacttgacgtggtggccactgccgatagtcccatcatcggcacccacggtaatgaggaatacctgctttacgctgtcttgagatgaatgcgttggcagtctccgttcaccagcagcacgctggaggtacggtcgatgcctagtgcggtggcacacgtggcgctttccaccgcactgccgttgcgtagcatggcggagtccgccgtcaaagtccggcattgcagatggttggcttcaaccgtgacggctgtgatatggcgaaccgtgctgccatcctcatacccatccatatcaaaacgggaaaacatcgtactgcggagtggatgaacttccagagccctgctgttgacgtcatgacccttcaacacgccgttcaagcggactgtctgaccgctaatatgacgggtgcctagggagccattgacggacagatttccggaacaaacgatatcgccgttgcatcgtagtttgccggtaaaggttatttcatcgcaaataatgtcgccgccgacttcgatgtcgccgctgccgctgatgctggatacgcgaatatcaccatcacaccgcacaatgccacttttgatgaccagtttgtccccttctataactgaggcctcgagggtgctggtcacaatcatggtgtgaaaatgcgcgccatcggcaagacgggaacgttggtccactcctatggtgccgtagactcctttgcctatcagcgtgcaattctgcgtatgcttgcccatgatgataaaactccccttattaatatggacgtacagctttatggcttattgccacaataatgagcgcatccatgttgagggggttatatcggtcacgatgtgagcagatagggggtatagcgagcgcagttagggggttagccttggatgaagtggtcgatctgatcctgcttgcccatgaggatgagttcgtcgttgcgatgcatgaccagttccttggagccgtactggaactccttgcctggggccttgaggcccaccacggtcacgccgtacttgtcatgtacttgtacgtcctcgatgctgcggcctaccgcgtacaggggcgtgtggaccttgacgacggtgtacggcccgtcgatttcgatgtaatccagataattgccggccaccagatggcccacgcgcttgccggcatcggtctccgcgttgatgatgtggcgggcgccgatgcgctgcagaatgcgcgcatgctcctgggacacggacttggcccacaggtcggaaacgccggcgtccagcaggttgccggtgatgatcaccgaagcctcgatgctgtcgccgatggccacgacggccgtgtcgaactgggaggcgtcgatctgctcgatggccagcacatcggtcatatcggcctgaatggtgggcagatgcgcggaccaacgggccacaagctccgggttcttgtccactgcgagcacatcctgacccatctggtcgagggtggcggccacggacccgccgaaacggcccagtccgatgaccagcacgcttttgttgccgctcggttttgctgccatgatgatggtcctctctatgtcagattgctgggcgccgattgaatggccgatcagccaacgataatgttttcctgcggataacgaataggttcgggagccatcggtcggctgatggagtaggcgatggtcaacgggccaagtcgtccgacaatcatctcggcggacagaataaacaggctggccggattgccggcgcttgccacgcccaccgaataaccacccaacgagaaggccgagcaggcttcgaacacggcgtccacgaacgcgcagccggtggtgaacatcagcatcatcgcaccgaccataaccaacgcaaagcaggccgtggtcacggacacggcggtcatctgaatacggcgggggatacggcggcggaacacggtgacatcgcgatggccggtgaatgcggcgcggcaaatcaagagaatcaccgcgaacgtggtgacacggatgccgccagcggtggatgaggaacctgcgccgatgaacatgagtatgctcatgaacaccttggtctcattcgtgacttcgggcacccaggaaatatcgaaaccggcggagcggggcatgacggcggcgctcatcgcacggcgcatcttcatgccggggtcatctgcggggaacaggccggtattgctccactcgaccagcaggaaccaagccagtgaggtggccaccagcacagcggtggtcaccaaagtgagtttggtgtgcaatgtccaacgtttcgggctgagccgccggcgtgcgcactgcaccagattcagcaccacggggaagccgagcgttccgatgaatgcactgatgagaatcggcagccccacgccccaacggttcacatgcagaccagtggcatccggcgtgaaaccggtgttgttataggccgacaccgcgtagaacagcgcctgccacaaggtacgccccatattgccatggttcacgcggaacaggtcgggcagcagcagcacgaaggtcagcacctcggcgatgatggaggtgcccagcaccacggtgagcacgcctttgacctcggaaagcttcgtggtgcccagctcgttcgcggtgagcatacgctgggagaccttgagtctgcgggaaacgccaagagccaccatcgaggcgaaggtcatgactcccagaccgccgaactggatggagaacaggacgacgacctggccgaacatcgaccagtattcgccggtgttcaccaccggaatgccgcaggtggacagggccgagacggcggtgaagaacgcgatcgggaaattggtgaagatgatgtccgatgtggagatcggcagcagcagcaaaccggtgacgatgatgatcagtgcgccgaaatacaccatggacagacggcccgggtgcctgagcagacggtcggtgatgctgatacgtcgaatgcgcttggcggttttatcgcttttgtctcggctcagtacatcggctgaataccaccatgacagtcccttcgaggcctcctcattggcggaggattcgtcgaagtcattggccatgggtcctcgagctcctcaactgatactgctgtacggtcatacggcatgccatcgcgctgcgcacggcacgcgtacggtgattgcgcggctgtacgccattgtatgccgaagccttacgataatcgactctgtggaacgttgccggcgacgcgccacgaagcagcatttttcgaacacctgtacgactgatgacggtgtctgcggttagaataatgagcagtgcgaccgaatcgacaggaggatgccatggccaagcgcaacgcggtggtggtgacgcataccaggctcaggcagaccggaaccgtagtggccgaggcggtgagccagctgcgagtggccggtttcgaagtcgccatcatcgacaacaccgaggcccccgatttcggcgtgcagccgccgtgcgtgtcggacgacaccgaaatcgtcgtggtcctgggcggcgacggcacgatactgcgcgccgccgaactcgtccactgcacccaagtgccgattctcggcgtgaacatggggcatgtcggcttcttggccgaattcgaaagcttccagatcgacgaggcgatccgccgggtctccacccacgactattcgatcgacgaacgcatgatcgcccatgtggacgtctggctgcccggcgccaccaagcccattgaggattgggcgctgaacgacatcacactggaacgcgccgaccggggcaagatggtcgaactgtccatccgcgtggacgatgtggagatgaactcgttcggcgcggacggcgtcatcgtctccacgcccaccggttccaccgcctacgccttctccgcgggcggtccggtcatgtggccgaacgtcaaggccctgcagttgattccgttggccgcacacgccctgttcgccaggccgctgatcatcggctccggctcgaccttcaccatcgatattctggacgattccatgtccgaaggctggatttgctgcgatggacgccgtcagcgcgccctgccgcagggtacgcgcgtcatggtgcgcgaatcgcgcgataccttgcgcctcgcccgactctccggcgtgccgttcaccaaccgtctggtctccaagttcgatctgcccgtggtcggttggcgcgagcacgcgcgcaacgaggcctcgagccagtcgctgcatcacgggcacacgttcccggcggccgcgtatgcggctggcgttgccgttgccggtgacgctggcgtcgctggtaccgagcccgacaagccgggcgaacgtgacggcaaggcaggatcctgatgctcgaagaactcgatatccgcaatctggggccgattcgagaagccaccattgcgccggccgcaggcatgaccgccatcaccggtgagaccggtgccggcaaatccatgctgctctccgcgatccgactggtctccggcggggccgccgaatcctcgcgcgtctcggccggggcggacgaggcttgggcccaggcgattttcgcgctctcggatgatgccgtcgcatctgaacattccggcgacaccaacgatgccggttctggcgatgccgacagtgggttcaccggtgctgccgcggccgtggccaaggcccatgacgcgggcgtcgaccccgaagacggcgaactgttcctttcccgcaccgtacgcgcttccggacgttcgcgggctgtgctcggcggcaagtccgtaccgcgttcggtgctgggggccatcgccggcgaactggttaccattcatggccagaccgatcagctgaaaatcgcggcctcctcacggcaacgcgagtttctggaccgggtggccggagacgaagccgaactggccgcctaccgcaaggcgtgggatgcgctggccgccatggatgagcggctggaacgcctgcgctcgcaggaatcctctgcccgccaacaggccgactacctgcgcgaatccatcgaccgcatcaaccgaatcgacccgcagccgggggaggatgaggagctgaaggcgcgccgcgaacgcatcgaaaacgcggccgacatcgcccaaggcgtgggttcggcgctgggcgcgctggatgcctcgcaggtggatgtggacgccgccgacggcgcttcggccgtggaactcatcaatcatgcggtgacctcgttgcgcgcgattcgcgtcggcggcacgttctccgagcaggccgatcggcttgaatccatcaatgccgatttgggcgacgtggtgttcgccctgagccaggagctgggcgacgaaggcagcgtggaggatctggaccagatcaacggccgtatccacgagcttggcgacctcgcccgtcggtggggccccaccttggccgacgtgctcgcttggcgggataaggcggcgttcgatctggaggatctggatgcctcgccggaaaaggtcgccgaactcgaatccgaacggcagacgctgtacgatgcggccctcgccgccgccgacgtgctgagcgccgcgcgcgtggctgccgctgccgacttgggtgcgcgcgtcactgaagaactcggctcgctcgccatgctgggcgcctccttggaagtgcgcgtcacgccgcgagacaaggccgatgatccgctcggcccgtatggtcgcgacgatatcgcgttcctgtttacgccgttcgaggggtcgccgcagttgccgatgggcaaaagcgcttcgggcggtgaactgagccgactgatgctggccttggagctggtggccgccgacacgcgcggcggtgccgaccagaccttcatcttcgacgaggttgacgccggcgtgggtggcaaggccgcggtcgaactgggcaaacgtctggcacggctggcccgcagcgcgcaggtcatcgtcgtcacccacttggcgcaggtcgcctcgtgggcggacgcgcagttcgtggtcaccaaggagccgccggatgccgatgacgacgatttgggcgtggtcaccaccatcgccgaagtcaacggcgaaacccgcgtccacgaaatcgcccgcatgctctccggcagcgaatccgaagcctccctggaccacgcccgagaactcctatccgattctcgacttacgctcccgctggcgggagctggcgccgcaggcgactgagggtggttgaagaagatggagattagcaaatgaccaaggccgccatattcgacctcgatggcaccctcctagactccatgggagtctgggaccaagtcgacatcgacttcctgaacaagcgcggaatcgaagtgccgcccgactacatgaccaaagtttccgccatgcaattccgccagatcgccgaatacaccatcgcacgcttcggccttacagacacgcccgaagagctcatgcaggaatgggacgacatggccagcgtcgcctattccaccacggtcgaagccaaacccggcgcgcttgactatctgcgcgatctgaaagactccggtgtcaaactgggtgtcgccacctcgctgcccccgcgtctgcgtgagccggcgctacgccacgtcggcatgttcgatttgttcaacgatatcgtctccgtcgatgacgcgaacgacgtcggcaaggaccagcccgacgtctacctgctcgccgccaagcgcctgggtgctgcaccggccgactgcacagtgttcgaagacctgctggtcggcatgaagtcggccaaatcagtcggcatgaaggtctgggccatgcacgacgactcctccgcctccgactggcccgaaatctgccacctagccgacggtgtcctcttcgacttccacgacgccccgcgcgtgctgtgataaaaaagttacgcccccgctggcggggctgtcggcggaacggcgttgttcggcataggtacccctttccgaggccattgtaggcacggcccatgtttcgacactgtatgttggcgaggtgtttgttcaccgtttaactgttatgtaacacaccttgacagttaagcagaacagttatactgtgttgtataacagctaaacagctggggtgctagtcaaccgcaaccgaaaggggcatagatgaaactgatcatctcatccgtgtccggtgagcccatctacgagcaaatcaaaacccaaatccgttcggcggtgctcggcggcgagttgaaggcgggcgaggccctgccttccctgagaaaactcgccaaggagttgcgcatctccgtactcaccgtcaccagggcgtacaacgaactggccgatgagggcgtggtgcagaacatccaaggcaaaggcactttcgtgatggacaagggcaacgaactgatgcaacgtcagctcgaaacccagattcgcgaaagcctggccgaggcaagccggggcgccaaagccgccggcattccgctggacgcattgggccacatgctcgaagaggaataccgcaaagaataacctcaagaaaggaccatggccatgaccgccatatccgaatccgacgcgatggcgttgcaggtcaccgacgtcaccaaacactatgattccggcttcacgctggacgacgtgaccttcgacctgcccaagggctacatcatgggactgatcggcccgaacggcgccggcaaatccaccctcatcaaactcatcctcaacatgatccaccgcgacgccggttcgattcacgtgctcggcctcgacaacgtcgccgacgaggagcccgtcaaggaacaactcggcgtggtattcgattccagctacctgtatgaacagtggcaagtcaagaacgttgaacgtatcgttgcgccactgtatccatcatgggacggtggatgctatcacaagtatctggatacttttggccttggtgacgcacagaacggcaagaaacatatcaaggatctttcccgcggcatgcagatgaagctgatgctcgccatcgcattgagccatgacgccaaactgctgattctcgacgagccgaccagtggactcgatgtgcttgcccgcgacgaactcatggatatactgcatgcctacattgaggatggcgaacattcggtactgttcagcacccatatcactgccgacctcgaacgtgctgctgacttcattacctacatcaccgatggccgtctctactacaccggtccgaaagacgagtttgaggaatcgttccgcctgattaagggcggtccagacgaactggcacaactgcctgcggacgtagtgctgggctcacatacgtatgccaccggattcgatgcgctggtccggtcagacgggcttgatgctgttgcgtcggtggtttcggggcttgtcgttgaatcggcttccattgatgacatcattcgactgaccaatgcccatgattccaatcgtgacttgagcgggaggtgagcggccatggaggcaatactgagggtgtcgcggtctcggcaacatgcattgaccactgcattgcgcgtcgatatggcctacctgtgcgtcggcgaacggactgtgttctcgttgttgttggcaccgttgttctccgtcatctttcaaggtgaagcttatggtgatggcttcggctatcgcatgggtgtcatcatgacggtattcacctgcgccatgtgggtgctaaccatggcggttgctgacttacagaacggatatcggcttcgtggcattattccggcttcgaggaagagtcaggtggccgcgcgatatgtggttggattggtgatttccgtattgtcgatagcgatgattgttctgattgacgggttgcaagtgctggtcaatccggattggtcattcgcgggcaatctgtgggcggcgccgttgggaggtttctgcaccgcgctgatgatcgcgcttatcgtgcccacgggttatctgtggaccaaactaggcggtcttcaagtcacgatgatggtgatctatgtcgttgtattggctgtatccatactgctatctatttcgcctgcttcggtgaccagaggattggcccatgccgcgaatgccatcatcgagcaacgattgtggctggttattgcggtattgacaacgacggttgtggcatatggaatctcgtatgtaattgcctctcgcatatttgcttcaagggaatggtgacgatgaactggaaatccgtagtaaagcaatgtcgattcgattgtgtcgggacgggtctgtttagcgtggcgaatatggtatttctgctggttttcccggtgctgtctatcgtggtatcgctggtgacgatatcgacccacgtcgatgaacacgttgccagtggtctgatgggcggactcggaggtttggcatcggcgatggcatgtatgagtgcattggggcctgcgtcatccgaggaatctgcagggcacagtgccatgcgagggctgattcctgtttcacgcactgcacaagttgtaggtcggtacctttttctgttggtggttggcctgctctgggctttggacgtggtgatatgcggcggcgtcttcattgtctttggcgatatagcagatatggggtggaccggtaccttggcagcaggtgctttcatcttcgctttggctatcattcttgggtcggtgctgctggcctgtgcataccggttcaccttccgcaagatgatggtggcctctggcgtggtcctggttggcttgtatgccgtcattgcgctgctggcccgattgcctgtcgactggcaatggcttttgctgaatattaccgatttcctgacgatctggtggcatacggcgcttgttctcgccgtgttgtgtctgctcgcattttttggctccatgcttatagccatccgcatctaccgagccaaagaactctagccgcgcatttgtccgaccgcgaatgaaaagagaccgacaggaatctgtcggtctctttccgttatcggtgtgttatcagtccaccagatccagagcgattggctggtgcggttgctgggaatcgctttcattggccgtgcggcgcgcgcggatggcggcggctgcgcgcttgacggtcttgataacttcctgcagcaccaccacgccgaaaccgaccgcgatgattttcagccacatgtcgatcggcagcggcacggtgcggaacatcgcgccgccgaattgcaccactagcacctgaagtgcgaacatcagcgcgaacacgccgatcatcaccttattgcgcagcagattggcgaacaggctggcgttgcccagctcgcggctgttgaaggcgttgaacagctggaataccacgaacagcgtgaacagaatggtcgactgctgttcggcggtgccgcccatgaagttcgtccagctttgcgccatgaacaccacggcgatgaacgcgccggagacgatgatgcgctccagcatgccgcgcgagacgatgccggcgtcacggcgggtgggcctgcggtccataagattgtcgcgaatcggctccataccgagcgtcagcgcgggcgggccatccatgatgatgttgacccacagcagctgcaatgcggtgaacggcgcggccagaccactgaacagcgaggcgagtaccacgaccaccgaagacaggttcacggtgagctggaactggatgaatcgctggaaattctcgtaaatgccacggccccagtgcacggccttgacaatggtggcaaaggaatcgtccagcatcacgatatcgctggcttccttggacacctcggtgccggcgatgcccatggcgatgcccacgtccgcgttcttgatggcgggcgcgtcgttgatgccgtcgccggtcaccgccaccacattgccctgggctttcagagcgttcaccacgcgcatcttgataaccggcgtgctgcgggcgatcacgcggatgcggccgatttcgcgggacagttcctcgtcgctcatttcctcgatctggcgcgcctcgacggcgatatgccgctcgtccagaatgccgagttcgttggcgatggccgtggcggtcacgatgttgtcgccggtgagcatcttgagctcgatgcccgccttgcggcagcgctccacggcaccgggcacatcctcgcgcaggggatccacgatggccacgaagccgtcgaacatcatgccggattccaagccggcgcggtcggcagcgtaatcgagagccgcagtgtcggcgtccttatcggaaatatggcggtgggcgaagccgagcactcggcaggactgcgcctggaacttcgcgatctcccgttcgatttcgccgcgcgtcttggcgtcgacggcgcacaggtcgagcatcttctccgggctgcctttggcgaacacggtaatgccgtcgccgtcacgcaccacagtggtcatgctcttggtctccgacgagaacggatacgtgtggagcaccgtcgcgcgctcgcggcgaatccggtagtcgagtccggccttgtgcgcggcgaccaacagtgcgcattcggtggggttgccgatgaattccggcatcgcgccggcctcggcttcggtggcgcccgggaaggtcacgtcggcggtgccgttgacgcagaagttctccagcagcatgcggttcctgatctgctcgggcttctccaaggcgcggcccggtgcattgtacgcctcgatcacggtcatgcggttctgggtcaatgtgccggttttgtccgagcagatcacgttgatgcagccgatggtctcgcacgccaccatcttcttgaccagcgcgttctgcttggacattttgatgatgttcaccgcgaggcacgcggccacgatggtcggcaggccttcgggcacggcggccacgatcagcgttatggaggtgatgaacgcctcggaaatcgtgtcgaacgaggcggtgccggaagccacgaaccgggccacctgaagcacgaacaccagtgcggccacaatcgagcccaccacggcgatcaccttgccgagcttcgcgagcttctcctgcagcggcgtcataccggtgttggcggcgcgcagttcgcgggcgatcttgccgaactcggtgtcgtcgcccacggcggtgaccacggcacggccattgccggcggtcacgaagcagccggaatagagcatgttcgtgcggtcggccaccggggtcttcgggtcggtgaacacggcgtcggtggctttggcactcggcacgctttcgccggtgagcgcggattcgtcggcggtcagatcgttcgattcgatgaggcgcgcatcggccggcagcttgtcgccggtgctgatctgcagcacatcgccgatggtgatgtctcgctgcgacaccagcgtgacctcgccatcgcgcaccacggtgacggtcgtgtcgtcattgatgtcgttcagcgcttcgaatgccttggcgctgcgaccctccatcaccacggtgatggtcacggacagggcgatggcgaagaagatgcccacgcattcgagaatgtcggcgtggccgccggccatggcgcgggtgatgttgacgcccagggtgatggccgccgcgatcataagcatgatgagcatcgggtcggcggccgtcttgacgatgcgggaaagcatcgattccggcttcggcttggtgaaggcgttgggaccgtactggttcaggttgtgcgcggcctgttcgctggtcaggccttgatgtgcatcggtgcccagcgtgctgatgactgctggcgcatcctgcatgaatggtgcgggcgtctgcccgttggccgtggtcatatgttcctctcgtttggttgacacaccgcactgaaacccgcgtaatatcactcgcgtaccgcgcaacatggcggcacgcagccaaacgaatcgttgacgaccatgtatcgcatactccgcggtacatgagtctcgtcatttaaggcaaagccagaccgtaacggaactgccgacggccacgatgttgacttgccacattgcggtttgggccgagcctttcgccgcaatgctgtctactccctcatgggactattcagttgcagaaacagaacctaacaaaccacatggattttcccgttcgccggcagcatggcgattcccgccttcctagaaaaaacaagcaacacgccattggctcgttgcaggtgaaaagccgcaagaaagccgcgcgtgacaaggctcggacatgcttgaacatgcctggaccttcgacttgtgacatcagaaaacaaaaaaccgatacatgctggtaaagcatgtatcggttgggaattgtcagttagtgccgtcagcggactatcacagcgcctgggcggccttctccacgtagtcctccatgccgtcgatggccacgacgtccttgaaccgcacgtcggcggtctcaagaccacgcagggcggccggggcggtggtgccggtctcgtgggccagcacatccatgcactcgaagtcggtgccggtggcgtcgaagcccaatgcctcgttcaccacgcgcgggaacttgtaggggctggcggtggagagcagcacgcgcggggtcagcgggtcgcgcggcatctgctcaagcaggtagtagccgcaggcggtgtgcgggtcgatcacgtagtggttctcgtcccaacagtgcttgatggactcgcgtacctgatcctcatcggcccaaccggtgccgaagatctgacgaatcttggccagcagttcttccgggatctcgtacgtgccccacttgttgaggtcgttcatcagcatggagatcagacgggtgtcgccctcggacaagtagtacagcatgcgctccaggttggaggagatgaggatgtccatcgagggggagatggtctggaagaacgggcgctggcggttgtaggtaccggtggtcaggaagtcgaacagcacgttgttcttgtcggaagccaccacgaggtgcttgaccggcagaccgagcagcttggcatagtagccggcgaggatatcgccgaagttgccggtcgggaccacaaactcgacctcatcgccgacgttgatcacctggtcggcgagcagttgggcgtaagcggagaagtagtagacgacctgcggcaccagacggcccacgttgatggagttggcggaggaaagcaccacgtgcgaattgccggcgagacgctcggccagggcgcggtcgccgaagatgcgcttgaccgcggactgggcgtcgtcgaagttgccttccacggcggccacctgcacgttggagccggcttgcgtggtcatctgcagctcctggacctgggagaccttgccttccgggtagaagacggtgatcgcggtgcccggggcgtccgcgaagccggccagcgcggccttgccggtgtcgccggaggtggcggtgaggatcatgatcttctcgtccgcgtcgccatcggccggcgtggtgtgcgccatgaagcgcggcaggatctgcagcgccacgtccttgaacgcggaagtcgggccgttgaacagttcgagcacgtaatcgtcgcccaggggcttgagcggggtgatgcgctcgtcggaccactgttcgccgtaggcgtcggcgatgcactggcccagctcctcggccgtgaagtccggcagcagcgcgcccagcacctcggcggcgatttgctggtacgacttgcccggcagggaggccacgtccaccttggtcttgcccaacgcgtccgaaacgaacaggccgccgtcatcggcgatgcccttacgaatcgcctgcttggcggtcagcgaatcggtggtgctacgggtggaatggaaggtggttgtcacgatgaatccttctgcctgaaagggatgatgaatccacatcagtctagcgtgggccgtgggcagaagggccgtccgtctcgcataaccgaccggtcgcaccggcgaaaatcaccattgccatcgaacggggaccggccatatcatgaaacaggccggctgcaaacgggccatacggtaaggcgacaacggcgaatcaattgtcgcttataccaaagagcacccatgaccgcttcaccccttgcgcagaaggcaaccgatgctttcaacgcgccgatctgcgaaaccgatcctgagatcgccgaactgctggactccgaactgggccgccagcgcagtggccttgagatgatcgcctctgagaacttcgtgccgcgagcggtactgcaatgccagggctccgtgctgaccaacaaatacgccgaaggctaccccggccgtttctaccacgccgaggcgtacggcgtgaaccccgagaccttccgcatcgacccggagatcatccgccagcgcacgttcgacggtgccaagatccttgccgaacgactactggccgacgacgtcaaggccaacggcatctccgtgctgaccggcggcaccgatgtgcatctggtgatggtcgacctgcgcaacagcgagatggacggccagcagggcgaggatctgctcgccgcctgcggcatcaccatcaaccgcaacaccgtgcccttcgacccgcgcccggcctcggtggcctcgggcctgagaatcggcacgtccgccctggccacccgcggcttcggaccgaaggaatacgaggaggtggccgacatcatcggcaccgcgctcgccgccggcccgtccgccgacgtgaccgcgctgaaggcccgcgtcgacaagctcgccgaagacttcccgctctaccccgacctggaccagattcactgattttttgcggatgtacgcggctccctcatcagagggagccgcgcttatatccccggctatcttcggtgcaatatgggtcgaaacgggcaatgcggcccattgtgggttactcttgttttttatgagcgatgaattgagtcctgaggtgttcgacgcggtgtgccgccaggccgatcaggccgcacgcgcacaggagcgtcttgcacaggcaaataccgaagccaaaaacgaactgttgcttgccattgcggacgcgttggacgagcatgctgcggacatcgaagccgccaacgcgctggacatgctcgaatccaaggaaaacggcatggatgcgggcaagctcgaccgcctgctgttcgacgtgccgcgcgtggccgccgccgcccaaggcgtgcgccatgtggccaccctgcccgatccggtcggcgagatcgtgcgcggatacaacctgcccaacggtctgcgccttacccagacgcgcgtgccgatgggcgtcatcggcatgatctacgaggcccggccgaacgtcactgtggacgtggccagcctgtgcctcaagtccggcaatgccgcgctgctgcgaggcggccacgccgccgaacgcactaacgccgccacgttgggcgtcatcgccccggtgcttgaagcccacggtttcgaatccgcactggtgcaatccgtcgaccagtacggacgcgccggcgccaccgccatgatggaggcgcgaggccatatcgacgtgctcgtgccgcgaggaggagcgggtctgatccaagccgtcgtgcgcaactccaaagtgccggtcatcgaaaccggtgccggcaacgtgcatatctacatcgacaagtccggtgatctcgccaaggccatcccgatcatcatcaacgccaaaacccagcgcgtgggcgtgtgcaacgccgccgagaagctattggttcataaggatgtcgccgccgaattcctgccgcagatcgccgccgctctggccggggcgaacgtcgtgctgcaggccgacaccacgtcgtacgacatcatctccggcgcggcgatcgagggccttgacctcaaccacgccaccgaagaggattgggacaccgaatacctggccctcaagatgggcatcaaggtggtgtcggatctgggcgcggccatcgaccacatcaacacgcattccacgggccacaccgaatccatcatcgccgaggattatgcggccatcgaggcattcaccaagcgcatcgactcggccgtggtcatggtcaacgcctccacccgcttcaccgacggcggcgtgttcggctttggtgccgagcttggcatctccacgcagaagatgcacgcacgcggtcccatgggattgcgggagatgaccaccaccaagtggatcggttacggaacaggacaggtgcgcgcatgaacgaggacggcaacatgaacactacggctgacatggcaaacaaggcaagcgaactgcggcccgacatcgacctcaacgatcccaagctcggcctgaagatcgcggccgaacggctcagcatcgtccgctacgtgttccttgtgcagatcgaggacggcatcgcctccgccgcccagcgtgcgtcgctcgaatacgcggacgccgtgctcatcggttggcccgagaccgattcgcccgaagtcgcggacctcgacgatgcccagctcaagatcgtgcgcgaacacatggaactcatggaaggctacatcggcaaatacagccagatggagcacgacggcgaccttgacggcatgaccgacacgctcatccgcatcaccgagcgtgtggccgaggtccgccgcctctaccagccggacttcccgctgcccaccttcgccgaaattcgtcgcgtggtccaggacgaatgggatgaagacatgggcaagatcgatcccaaggaagacaatcccaccgccggcgaaatcgaagaggaaaccgaatcagccgatgacgccgccggcgagggcggccaggcatgagtggtgttatcggcagccacaaaacggctgcgtcagttcagtccgaaaaatcagtggaatccgccgagcccgccgaaatcgttgccgtcacccaaggcgaaaccgaacggcgcatgtccgacctgtccgcgccggccggggccagcagccacggcaaaggcagactttccgcacgcggcaactggcatacacgcctgcgcgtcggcatcatgggcggcacgttcgacccgattcacaacggccacttggtcgccgcctccgaagtagcttgggtatacgacctcgatgaggtgattttcgtacccactggccgacctgtgttcaagctggacaagcacgtcaccaacgccgaagatcggtatctgatgactgtgatcgccaccgcatccaaccccaaattcaccgtctcgcgtgtcgacatcgaccgtccgggcgtcacctacaccatcgacaccctgcgcgatatccgcgcccaacatcccgacgccgagctgttcttcatcaccggcgcagacgccgtggccgaaatcatgcagtggaaggacgccgacctcatgtgggacctcgcccacttcgtggccgtcacgcgccccggctactccagtccggacggcgtgaccttgcccgaaggaaaggtcgatacgcttgagatcccggccttggccatctcttcgaccgatgtacgccgccgcgccgaacacgacgagccggtctggtatctggtgcctgacggcgtggtgcaatacatcggcaagcatggtctgtattcatacgaggactgacgattcgtacgaggactagtgtgcatttgtacgagggctggtgaggattagcgcgaatcagtgcgcatcaatcctcaccagtgcaaaggataagcagtcaggccagtcccatcttgattttcaatgccattacgcgagtcgccgccgccgtcactttcgaagcgaaagccggatcggacttcgcccgttcgttgaggccgtccacaattggctttacgtaatccgtctgaccgatgcaggacatgtcgccgcccgcctcgacaagctttactcccaattggcttacatcgtagctgcttaacgcttcggcagacatcgaatccgaaatcaccacgcccgtgtacttcagggcgttgcgaatatgaccgtcgataatcgtagaagaaaacaccgccggattattcgggtcgatggattgatacgtggccaacgacatcatcaccatcgcaggatcggtcttggtgatcgcctggtcaaaggcacctgcctcggccccgcccaacgtggtggtcgtatccagaatgccttcggtggtgaagtcggtattgccgcttaccgcgcccaacccaggataatgtttgaccgccgcgccgacctgagcgtctcgcaaaccttcaataacggcgatgccatgttcggcgttgccggccgcatccaatccgaaatcacgatccagcgcgccaatcggagcatttgaggcacgatcgcccaccaccgtgccgagcaccggtgccaaatcgacatttatgccagcagcagctaattgcgaaccccacgtgcctgccgattgacgcaatgcgtcagcggacattgtgccctgctcaacggcactgggcattgtgtcgaaaccggtaccagtcagatgctgcacctgaccgccctcctgatcggtggcgatgatgagacgattgccggccggcgcatatccttggagttgcgcggtcgcggtcttgaccgtatcggcgccggtattccaattgccaatgagaatggccgagccaatgtgctcatcggtgattgttgaagccaacgaggagggatcggaaccggcaagcaacggcaccatcactaactgtcccacacgttcctcaagtgtcatggcggataccgcacgttgggcttgtgcggccggttcgttcttcttcggggaaggaacgtcggcgcgtggtaacgcacttgtctgggaggtctggggagtggtggtgttgccgtttgatgtggatttggcgaaccatccgacatgccatccgtaggctgccacgccggccaacaccactgccaaagcacatattgtcgccacgattggagtgctcctgtgccgaagttggcgtgtggcgtgtgctgagggacgcatatgttgtggccgttggctgttcataccggcaagcgtagaacggagcgtagaacagaacgctgcctcattctgtgctcagggcataacctacctcccgccctttcgataggcttgagttatgtcttttaacgatcctttctcaatactgttcggcaatggcggcgattcacgacgcaacaatgcgaacaatgacgatccgatcatcctcgatgtcgaggccgatggggacggtccggcccgcaacaccaacgccggcccctccgggtcatcccgccctccacgtggcccggccaatccgcgtatcacccgtaagccagcgtccggtggctcaggaggcagccgtggcagcaagattctgatcggcgtggtgctggccttggccatcatcgtcggtctgttcttcggcctgtcccgattcatcaccgatctgatgtggtacggccagctcggcttccagtccgtggtctggacccagctcggggtgaaaatcggtctgtgggtggcctacgcgctgctcatggccttgaccggcttcgtttccgcctggctggccattcgagcacgccctgattcggccgacggttccaccattcgcattaacggcgatgtggtcgaggtcggcaaatccgtcagctcgaaaaccgctcgccgcgtggccgtggtgatttcgctgatcgtcggcgtcatcttcggctctcagttcaacgcgaactggagcgagattctgctcatgttcaacgcgcagtcgttcggcaccaccgatccgcagttcggtctggacaacggcttctacgtgttcgtgctgccgggcctgaagctcgtgctcgccgccgtggccatgctgctgggcgtgggccttgtgttttccgtggtcactcatgtgctgatgggtggtatccgcattactatgccggttaacggacgcggcctgttctccatcaccaagcgttgccgtcgccagcttggcatctggctgatgctcaacatgttcgcttgggcagtgcgccagatgatcggcgtcttcgaccagctcaccgtgcagggttcacgcatcaccggtgcctcctacaccgccgtgcatgccaacatccccgtcaccttcatcatggccgcgctgaccgccatcctcggcgtggtgctgggcatctggctcatgcgttcccacacgctcgaaggccaggcgtccatcggcgtgcgcgcctccgccgcgctcaaggcctggcgtgtgccggtgacctccattgccgtcgtggtcgtggtgggtcttgtgctcaccgtggcatggccggtgctgttgcagcgcttccgcgtcaacccgaacgcacaggagatggaatccacctacattcagcgcaacatcgacgccacccgcgccgcctacggtcttgacaagctcaagaccgagcaatacaaggtgaccgacaagggtgagcagggcgctctggccaaggaggccgacaccaccgcgcagatccgtctgctcgacccgcaggtcgtcagccccacgttcaaacagttgcagcagtccaagcagtactacaccttcgccgacaccctggcggtcgacaagtacgagattgacggcgtctcccaggacaccgtgattgccgcccgcgagctcgatctggccggcaatgacaaccgcaactgggtcaatgaccacaccgtgtacacccacggttacggcgtggtggccgcctacggcaacaaggtgaccgccgacggccagcccgaattcttcgaatccggcatccccacccagggcaagctcaccgaatccgaaaagtatgagcctcgcatctacttctcgccgaacaccaccgaatactcgattgtcggtgcccctgaaggcacacaggcttgggagttcgactacccgaccggttcggaaggtgctctgaccacgttcaagggcgacggcggcccttcggtcggcaacctgttttccaggattctctacgcgatccgcttcggctccgatcagattctcttctccgaccgtgtgaccagcgaatcgcagattctctacgatcgttcccccaaggagcgcgtggccaaggtggcaccgtacctgacgcttgacggccgcgtgtatccggccgtggtcgatggccgcgtcaagtggatcgtcgacggctacaccacctccgacgcctacccgtactcgcaaataaccgacctcggctccgccaccaaggattccaccaccgtctcttccgcaacggtctcgtccctgggctctcagaaggccaactacatccgcaactcggtcaaggccaccgtggacgcctacgacggttccgtggacctgtacgtgtgggatcaatccgatccggtgatcaaggcatgggagaagatcttccctggccagtaccaccagctctccgatatctccggcgacctgatgagccacatgcgctacccggaaagcctgttcaaggtacagcgcgagctgctctccaagtaccacgtgacctccgccaaccagtactactccggcgaggacttctggcagacgccggtcgacccgaccgaatcccagtcccagcaggaccaggacatcctgcagccgccgtactacctgaccttgcagaccggtggcaccaaggaaccggtgttctcgctgagctccacctacattccggctggccagtccacccgtgagatcctcaccggcttcctgtcggtcgactcggatgccggcaatgagaagggcaagataggctcaaactacggcaccatccgattgcaggagctgcccaaggattcgaacgtaccgggccccggccaggcgcagaacaacttcaacgccaacgccgacgtgtccaaggaactgaacctgctgcaatccggcgacacgcaagtggtgcgcggcaacctgctcaccctgccgctcggtggcggactggtgtacgtgcagcccgtgtacgtcaagtcttcgggtgcgacttcattcccgctgctcaagaagacgctggtcgcgttcggtgatcaggtaggatttgcggatacgttggatgaggccttggatcaggtgttcggtggtgattccggcgcggccgcaggcgatgccgagaacgtgtccggtgacggatcgtctggtgaccagtcgtccggcatatccggtgaccaatctggttccgataccaatggtggccagtccggcaccacggacggcaagtcggattccggctcgtcttccgaccgtagccccgaactccagcaggcgctgaacgatgccgcccaagccatgaaggacagccagtccgccatgaagaacggcgactggaccgcctacggcaaggcgcagaaggagcttgaagacgccctcaacaaggccatcgagctcgacaagtagttccgacaggaattggctcccctcagggtgaggggagccatcgccgaaggcgactgaagggagtcggttacctcaactgacatagcccgtccttatcataaggacgggctatttgcgtattcaaaggaacctcatgccatacaccttccgtccggccgtcgaatccgacgtccaagccatcgccgacatctacaacgcctcagtgatggccggcggtgcgaccgccgacctcaccccgcgcaccttcgaccaacgccgcgcctgggtcgaatcccatacgccgccctacggcgtttttgttgtggaatcggaagacggttcaatcattggcttcggtgcgctctccgtgttctatgaccgcgcaggatatgacggtgtcaccgatttggcctattacatcgatccggcatggcaaggcaggggagtaggcacgttcatgcttgacaggctgctcaccgaggcgctggcccgccacatgcgcaagacctgcggcatcattttcgccgataacgccggctccattgccctcatgcaccgcttcggcttcacccaattcggactcatgcccgccgctgccaccgactccaccggcaccatgcgggacatgtcctactggtatttggacctgtagccttgcagtaagtcatttcagtcaagaaaagtgtgaggatgccggagcaaacgagcttgacggcggcgttgagtacaatcttgacggttggatccggccgggcatgggccagtgcgcgaggcgaacgcgcgcatgacgtacggaacgtacagaacgtgcatacgggaataaaggaagacggacgaggagcggattatggcatcggatttctggctgattgcgggactgggcaaccccggcaaaaaatatgaggacacgcggcacaacatgggcttcatgaccgccgacgtgctcgccgaacgttggacggtgaacttcgccgatcacaagggcttggccatgctcggtaaaagcgtgatgaacctggacggccgcaccgtcaagttctttctggccaagccgctgacttatatgaatgattccggcaatgcggtggcttccattagcgcctattaccagatcgagcccgaccatattgtggtgattcacgatgacatggacttggaattcggccgtatcaaggtcaaggcaggcggctccgcaggcggccacaacggcatcaagtcgattgaccgttccctcggcacgccgaaatacgcgcgtgtgcgcatgggcgtcggtcactccaagcgcggtgcgaacgcgcatgacaacacggtgaactgggtgctgggcggattcggtccggaccagcgcaagcagctgcccgaattcctggctgacggcgccgacgccgccgaggacatcatcttccacggtcttgccaagacccaggagaagttcaatggccggtgaggcgacgcacccggacctgatcaacggctcactggtaggcatcctgtctgagctggaacaggacaagaccttcctgaagctcgccgccggcgacatcgaggcttcggacgacgtcgacaactccgtcctggccggcatccccgaaggtttgcgcccggctttggccgccgccatcgggcagggtgtggccggcaaacccggcaagccggtcgtgctggtcgtggcctccggccgcgaagccgaagagaccgtgggctcgctgcgctcctggtatgatggcgacccgaacgacatcgcccagctcgaagcctgggaaaccctgccgcacgagcgtctgagcccgcgcgcggacaccgtggccagccgcatggccgtgttccgcagactcaagcatccgagcgataccgattcgatgttcggcccgattcgcattctcgtcatgccgatccgctcgctcatccagccagtcgtccaaggactgggcgatgtcgagccgctcgtgttcaccgtgggggaggacctgcccctcgacgaagccgccaaacgtctgatcgaaaacgcctacacgcgcgtggacctggtcatggaccgtggcgagttcgcggtgcgcggaggcattcttgacgtattcccgcccaccgcaccgcacccggtgcgtatcgaattcttcggcgacgaaattgacaccatcaaggaattccacgcctccgaccagcgtacctacggcgacggcctcaagaccatctgggccaccgcatgccgtgaactgcagctgaccgacgccgtgcgcacccgcgccaaagccttggtcggttcgattcccaatgctgaggacatgctcgaatccatcgccaacgccattccggtcgaaggcatggaatccctgatgcccgcactcgtggaccatctggaaccggtgggctccatgcttcccaagcacgccgtgatcctcctgagcgacccggagaaactgcgccgttccgccgaagacttggcaaaaaccgcgaacgagttcctggccgccagctggcatgtggccgcctccggccacggcgccggcgcgcccatcagcttcgacgaagccagcttcctcgactatgcggaaaccatcagctccctcgaatactccgaacatccggtgattcgcctcaccagtttcggcgtggacaccacgttgaccggccatgtgcagctcgacgcccagaacccggccgaattccgaggggatgaggccaaggcctcccaaggcatcgaaggcctgctcgatgccggcttccacgtcaccatcaccgccgctgcggccggcaccttggccaggctcaagcgtgcgatcaacactaccggcatcgccaatttcgacgtcatccgctctcaggccatcgacggcttcgtggacaaagccgccaaaatcgccctgctcaccgaacgcgacctgaccggccgcacttcagccgtggccgtggccaaaacgccgaaacgccggcgcaaggccatcgacttggtggagctcaaaaaaggcgattacgtggtgcacgagcagcacggcattggccggttcatcgaaatgcgtcagcgcatcatcggcaccggcgccaacaaaaccactcgcgaatacctggtcatcgaatatgcgccttccaagcgcggcgccccggcggacaaactgttcatccccaccgaccagctcgaccaggtcagcaaatacatcggcgccgaagcccccaagctcaacaagctcggcggctccgactgggcggccaccaaggccaaggcccgcaagcacgtccacgagatcgccgacgacctgatcaagctgtactccgcccgccagcgcgccaagggcttcgcgttcagcccggacaccccatggcagaaagagctggaagacgccttcccctatcaggaaaccgccgaccagctcaccaccatcgacgaagttaaatccgacatggaaaagcccgtgccgatggaccgcctcatctgcggcgacgtgggcttcggcaaaaccgaaatcgcactgcgtgccgccttcaaggccgtgcaggacggcaagcaggtggccgtgctcgtgcccaccacgctgcttgtccagcagcattacgagacgttcagcgaacgattcgagggtttcccggtcaatgtggcggccatgagccgattccagaccaccaaagagatcaacgaggccatcgaggggctggaaaccggcacggtggacgtggtcatcggcacgcacaagctgctgaacccgaaaatcaagttcaaggatctgggactcgtcatcatcgatgaggagcagcgtttcggcgtggaacacaaggagacgctgaaagccctgcgcaccaacgtggacgtgctgtccctgtctgccacgcctatcccgcgcacgctggaaatggccgtgaccggcattcgcgagatgtccacgctcgccaccccgcccgaagaccggttgccggtgctgacctatgtgggcgcctacgaggatgcgcaggtcaccgcagccgtacgccgcgaactgctgcgaggcggccaggtgttctatgtccacaatcgtgtgcaggacatctcgtccatcgccgacaagatccacacgctggtgcccgaggcgcacgtcggcatcgcccacggcaagatgggggagaagcagctcgaccagatcatccgcgacttctggcatcgcgacatcgacgtgctcgtgtgtaccacaatcatcgagaccggtcttgatatctccaatgcgaacacgctgatcgtcgaccatgccgaccgtttcggcttgagccagctccatcagctgcgtggccgcgtcggtcgcggccgcgagcgcgcgtacgcctacttcttgtacgacccgtccaagccgatgaccgagcagtcccatgaccggctcgccaccatcgcgcagaacacggcgctcggctccggtttcgacgtggccatgaaggacttggaattgcgcggcaccggtaaccttctgggcgacgagcagtccggccatatcgagggcgtgggcttcgacctgtacgtacgcatggtgtccgaagccgtggaaaagtacaaggagcccgaagagaacgtcgagccggtggccgtgtccatcgacctgcccatcgaagcgtcgattccgatcgagtacattgattcggacaagctgcgtctggaagcgtaccgcaagctcgcctccgcccgcaacgaggccgatctgaaggatttggaagaggaacttaccgaccgttacggcaagccgccggtcgaattcgagaccctgttcgacgtggcccgtctgaagttcaaggcccgcaagctcggcatttcggagattctcgcgcaatccaaccgcgtgcgcatcggtcgcatcgacccgcccgaatccatccagatgcgtatgggccgtatttacaaaggcacccaataccgcccggtcacccaccaactcatcgtccccaccccgttcaccggctccctgggccaaggtcccatgagctccgaccaggtagtcctctggaccaaccagttacttgatgatttggcatggaccccgtcgtcaagcaaacggcagagccgtttgtagacggggtgcgaggcgacagtcgagccagctatggctcaccgggcaacctccggtgagccatattcatattcatgccgtcgtttgtgacgatgattcaccccagacggaatcgttccgactgtccagcgagcgagattaagtgactgctatgagcgaaacgactacgagccgcacgaaccagagcgcgaccacggcaacacttgccggctatgagattccccgccttggcatgggcacgatggcgctcgccatcgaggggcgcccctccaaccgtgatcaggcaatcgagaccatccatgccgcgctcgatgccggagtccgttatttggacacggcttggtcctattatctgcccagcgcacccggcaccggcgaaccggaggatatgggctatggcgaatatctggtccgcgatgctctgcactcgtggcatggccccaaagatcaggtgctcgtagccaccaaaaccggctggctgcgcacgcttgacggcaacggcaactacggctggcaggccgacgcccgacctgaaaccatgatcgccaatgccaaggaatcagcccgccgcctcggtgtcgatacgctcgatctgctctactcgcactgcaacgatccgcaggtgccgtacgaagaccagatgggcgcactcaagcagctcgtggacgaaggtgtggccaaagctgtcggcatctccagaatcgacaacgcggacatcgaaaccgcccgcaatattttgggcgatcgtctcgtggccgtccagaaccagttctccccggtccaccgcgaccctgaacacacgttggaaacctgcgaaaagctcggtttggcttttgtctgctggtcgccactcggcggattcctcgacccgttcaacgagcatctgttcgaccggttccgcgaagtcgccaagattcacgactgctcctaccagcgcgtcacgctcgcgtgggaacttgcgcaataccaatatctgttcacgattccctcggccagaaacccgcaggagattcaggactcgttcaaagccagcgaactgaaattgtccgacagtgagatcggctacctcaatggcaaggacgttgactgagcgatttcgtccgtactgccttgcaatcaggcggcacactggcattgtgagcgctaacgctaaattttgggcgtgttgttcacaacgtccacaaatcgcactactcttaagaatgtcattcaagatacacaaccgttttaaggagtagttgtggcagtaattgaaagcgtgtacgcgcgtcagattctcgattcccgcggcaacccgaccgttcaggtcgttctggacaccgaagacggcgcccagggcctgggcctggtcccgtccggcgcctccaccggtgaggccgaggcttgggagcgtcgcgatggcgacaagtccgtctacggcggcaagggtgttcttaacgcggtcaaggccgtgaacgaggtcatcgctccgaaggtcatcggcatggacgctgctgaccagcgcgctctggacgacctgatgatcgagctcgacggcaccccgaacaagggcaagctgggcgccaacgccatcctgggcgtctccctggctgctctgtacgcttccgccgagtccgccggcctgccgctgtaccgctacatcggcggcaccaacggccacatcctgccggtcccgaacatgaacatcatgaacggtggcgctcacgctgacttcgccaccgacattcaggagtacatgatctccccgtacggcttcgacacctactccgaggctctgcgcgctggcgttgaggtctaccacaccctgaagaacgtcctgaagaaggaaggcctgaacaccggcctcggcgacgagggcggcttcgccccgaagatgaagtccaacgaggactccctcaagtacatcatggacgccatctccgccgccggctacgagcctggcaagcagatcggcatctgcctggatgtcgcctcctccgagttctacaacaaggagaccggcaagtaccgcttcgacggtgaagagcgtgactccgcctacatgctcgactactacgagaacctcatcaacgagtacccgatcgtctccatcgaggacccgttcaacgaggaaggctgggaagactgggctgccatcaccgctcgcctcggcgatcgtctgcagttcgtcggcgacgacctgctggtcaccaacccggctcgtctgcagaaggccatcgacctcggcgctgccaactccctgctggtcaagctgaaccagatcggttccgtcactgagaccctcgacgccatcgagctggccaccgccaacggctacacctccatggtttcccaccgctccggcgagaccccggacaccaccatctccgacctggctgttgctaagaacacccgccagatcaagaccggtgccccggcccgtggcgagcgcgttgccaagtacaaccgcctgctcgagatcgaggaggagctcggctccaccgctcagtacgccggctacagcgccttcaaggcctgcaagaagtacctggccaagtgagctgaaacgcccgtaaaggcgtgagtttccactgaagctcgatacccgtcgtattcgtcaagtcgaatgcggcgggtattttcgtgtgacatgagcaagtcgtcccgtaccggcaaacctggcaaaaccggcaaagcacgagttaggaaaaaagggtcggcggggcctatagcgttcttcgtctccctgttcattatcgcccttggcaccatccagctggtctccaccttccacacctatgccctgaacctggccgaactcaatggtctcaagcgtgaggaggcttcgctgatcgccaaaaagcaggagttggaaaacgacatcaagcgttgggatgacaaggcctacatcaccgcccaggcccgtgaacgcctcggcttcgtattccccggcgaacaggccgtgcgtgtgcttcatcccgaagccgtgaccggctccgatagcgaatcccagaaaacggaagattccagtagcagcaacaaaaaagtcctgccatggtacagcgaactgtcttactcgctcaaaaaggccgatgagcctgtgaccgatagcgagtccggcaaatccgatatttccggttcctctgactcgtcatccaacgactcatccaagcggtccgataagtcagaccagaacacccaatccgatcagaacacccaacagaatacccaacagaacacaggggagggaacccaacagtgaccatcgatatcgccgccaaggccaaggcccttgtcgataccgtgcttgccgagcccgccaacgatcatgacatcgacctggtgcagcgtcagctcggccgatacccgcgcggcatggtcgccgtgggggcgcgatgcgtctgcggtaggccacttgccgtaatcacccgtccggtgttgcccggcggaatccctttccccaccacgtgctatctgaccggtccggaagccgtcaaggccgcctcccatgtcgaggccgccggcgtgatgcagcaatacaacgacatgttggccttggacgaggagctcaaggccgcatatgagcaggcccataacctgtatctggcattccgccacgaactggcaggacgtcttggcgacagtgaggagcatattgaaggcacttcggccggcggcatgccggtgcgcgtcaagtgcctgcatgccctgctggcccagtccttggttatggggccgggcgtcaaccccattggcgatttggtactggaacgcgtcaaagacgaattcgatccgaccgtctgccgctgcacgctggacgattgatcaacagatgagccagcgcgaacagtccattcatacgcactaagggatacgaggagaaggcaatgagcaaggaatccgtaaccgtcgccggcattgattgcggcacgaactccattcgactgaaaatcgcacgtgtcgatgccgatggcatgcatgaggtggtgccgcgcatcctgcgtgtgatccgtctcggccaggatgtggacaagacccatcgttttgccgacgaagcgttggaacgcgcctatgtggccgctcgggaattcgccggtgtgattgccgaacatcccatcgacggcctgcgtttcgttgccacctctgcaactcgtgacgcggaaaaccgtgaggagttcgaggatgagatcgaacgtatcctcggcgtgcgccccgaagtcattcccggcaccgaagaagccgacctgagcttccttggtgccacttccgtggtcaatcgcgacgatctgcccgccccctatctggtggttgatctcggcggcgggtccaccgagctggtcatcggtggcgacggcgtcagtgcgcccactacccaggttcagggcgcgttttccatgaacatcggttccgtgcgcatgaccgaacgtcatctgaccaatgatccgccgacccagacacagatcgatgaggccgttgtggacgtcgatgaacatatcgatgaggccttccgcaccgtggacgcaggcaaggcccgtaccatcattggcgtgtccggcacggtgaccacgatgaccgccttggccatgggattgaaggaatacgatcacaccgtggtcgacgggcatcggctgagccttgaagacgcctatgccgtggacgacaagttccttaggatgacgcgcgccgagcgccgcgaatacaagaccatccaccccggccgtatcgatgtggtcggcggcggcgctgtggtctggagccgtgtgctggcgcgtgtcagcgaagccgccaaggccgatcatggtgaagccatcgattcgttcgttgccagcgaacacggtctgctggacggcattgtgctcgattatggtcgccggttgctggctcaatagcgtaagtggtaagtgcctccagcgggctgagccgttaagcaaacagcccggtgggctgtttgtaggcgaggggagcggctatgccgcgacggctgcacgaagtgcagtaacccgcaagcaatgctcagggcaggagatagcttataatagaaaagttggcctccgtggcgaaatggtatacgcagtcgacttaaaatcgatcgcttcggcttgtgggttcgagtcccaccggaggcaccttgaaatcggcctgtggccgatgccgtttttgcggctgtgccgtggtctctccccagtcggcttcgccgacagcccccctcgtcagagggggctcgcagctcactatgtggagagcttataaggccgaaacaaaaggccgttaggctatgtggcgttgtgacgatgtacctgatgaaacgaggaatccacatggcttcacgctggaccgatgtcgaacgagtcgaacaaggcgcactgcccaccatgcttgcccaagccgtcattgcgggcactgcactcaccgttggtgccatcgcctgctcgggattctatctgtccatgatcggcaatgtggccgcactcctgccatgggcgactatcgtgatactgatcgccgtggcgttcacctacatcgtcggcttcgccctgttgtggtgtgccgaagccctgaccctgcgtgccaacgacaaactcaagccatggctgtacggcgtcgtcggattaatcggctacggcgtgtggggcatgttcgtgatgagcgcgatgatgaacacgctgaaccagccgctgaacggcgtggtgttgtcgaacggcgatgtgatggccctgaccgtcaactacgcggtgttcggcttcatcgccttcctgttggcacaggcgtacgcgcccaaaatcgccaccaagaagggactgaccatcgggctgatggtggtgcagatcgtattggccatcatcggtatcatcgtactggtcatgatgttctccgcactgtctcactgactgacttatcgctcgccggcatgacgcgcgcggccatcatcgcacaaggcgaaagcgattccgggcgctgggctgggatacgatatcgtgatggtatgacgcctggtaacaccggcatgccgaaccagcaggggagaaggagccaaatgttcagtgtgcttgacatgttcaccatcggcgtcggaccttcatcctcgcacaccgtaggcccgatggtcgcggcacatgctttcgcctcctcgttgcaggccgaccatttggtcgatcgcaccgcacgtgtcaaaatcacgctttatggttctctggcgctgaccggtctcggccacggcaccgatcgtgctgcgatggctgggctcgaaggcaatctgccggccaccgtggataccgaccacatgatgcacatccgcgagatctgcgcgttggatgatactctgaacctcgccggcctcaaacgcatccatttcgactacgaccgtgacgtggtgttcgaacaatggaagcgcatggccgcgcaccccaatggcatgcgattccaggcgttcgacgccgccgcaagcttggtcgacgaacaggtctggtattccatcggcggcggattcgtgcgcaaaggcgctcccgaagacccgatgatcggcattcatgaacgccctccggaaggcgcctcctttgccgatgcggacaagtcatcatccactgatttcggcgtcgaggcaccctacccgttctcatcatgcactgaactggtgtcgttatgccgggaacatcatctcagcatcgccgaacttgtatgggccaacgaaaccgcttcacgctcgggcatccaggtccgatccgatattgatgccatctggcgtgttatgcgcgcctgtgtggaccacggatgcacctcggcggaacccacattgcccggtggccttgacgtaccccgccgcgcgccgaaaatgtatcggcgtctcgcctcgaattccgatgtgctgcgccgcgacagccggcgcaaagacgccgtgctcgagtcttccgacgccgcatgggtggatctcttcgccttggccgtctctgaggagaatgccggaggcgggcgcatcgtaaccgctccgaccaacggttccgccggcatcattcccgccgtgcttcactattactggcatttcgtggacaacgccaatgaacagggcgtggtcacgtttctgctgaccgccggtgccatcggatacctgttcaaacgcaacgcctcaatttccggtgcggaagtcggttgccagggcgaagtcggctcggcctgttcgatggcggcggccggacttgccgcagtcgtaggcggcacgccggaacaggtggaaaatgctgctgagatcggcatcgaacacaacttgggtctgacttgcgatccggtgggcggattggtgcagattccatgcatcgagcgcaatgccatggccgccaacaccgccatcaacgccgtgcgtatggccatgctcggcgacggctcacacatcgtgacccttgatcaggccatcgaaaccatgaagcagaccggtgaagacatgatggccaaatacaaggagacctccaagggtggacttgccgtcaatgtcgtcgaatgctgattgacatgtccggtattcaccagcatgatgaccggaattgacgtatacggccagcgtgtcgtatcgcacagggatgaaggactaccgccgattcgccgatggtgctaaggtagggcgcattgtgtctttgaaggaggactaatgacagatcagatgcctcaggtgaacgccgaatttggcaccacgcccgttatcgagttcccgacgcccgaagccccgaagggcctcaaggttgtggagctgaccgagggagacggcccgatcgtgcgtcgcggcgacaccgtcaccgtgaactaccacggcgtggtgtggggtaaggacaccccattcgactccagcttcgaccgtcatcagcccgccagtttcggcatcggcgtgggacaggtcatcaagggctgggaccagactgtgccgggccataacgtgggttcgcgtctggtggtttccattccgccggaatacggctacggttcccgcggcatcccgcaggccggcatcggcggcgaggacacgctggtgttcgtcatcgacatcatttccacccgctgaccataggtcagcacatgacgaacgccggggtcatagccggcgttttgtcataaataacgaagattgtttcagcatcgacaacggttcaggaggacgatatggctgaggacaaggtctacctgctgacgcaggaagcatacaacaagatgaaggaagagctcgcccatcgtgaaggtgagctgcgtgaggaaatcgcgcacaagatcgccgtggcgcgtgccgagggcgacttgtccgagaacggcggctaccaggccgcccgtgaggcgcagagcaagaacgagggccgcatcaccgagctcaccgtcaagctgcgcgattccaagatcatcgagaatgctccggaaggcaccgtgggcgagggctctgtggtgaccatcgagctcaacggcaacgagatgacctacgtgctcggcagccgtgacatcgtggccggcactgactacgacatcatgaccccggattccccgattggcaaggccatcgagggtgccaaggtgggcgacgtcgtttcctacaccgcaccgaacggccgcgagctgtccgtgacggtcaaggccgccaagccgctggcctgagttaagtgactggtatgcccccgtaggcgggggcatacttatatgtcgtagcgcttattgccacagcgagacgatcaccatgtagatggccaccatatggcaggcatatccggccaccgttccgcagtggaaaatctcatggaatccgaagacgcgaggccaagggtcgggcttgcgcaaggcgtagacgatggcgccgaggatgtagcaggcaccgccggcgcacagcagcaccaccacggctggccccgcatacggcgaattccagaacatcaccatataagccaggccgtagatgccgaagatgatgtacaccaccgtatacagccagcgtggtgcattgatccagatcacatgaatcacgatggcgatggccgtgcacgcccacatcgatatgatgatcacattgcgccagaacggttccagcgcaaacgaaaccggggtatacgtgccggcaatgagcaggaagatgttgacatgatcgatacgccgcagcacatcggtgacgcgcgggctccaatcgcccagatggtagcaggccgaattggtgaacagaatcagcgacgctgtcatgaacacggcacacgcccacttcagactcgcgccatgtgccaggcatataagcacgatgcctgccgccaatgacaggggagcggcaatcgcgtgaatccagccgcgcatcaacggctttggccgtccgtgcacgtcgagacgaatcttgcgttccacttccgcaggggcaatgccctcgattttcagcgcacggttctccgctttggcgagcttgtgccgggccttctcctcggctttggctcgaatggcctcggccttgaactgggccttggcccgtacggcatcagccttggcctgcaacgcctgttcgcgcgcctcgatagccgcctgacgcttggatgcgatggtggcgtcctctgcaatcgccgcgctgttatgagcgtcgtgatgcatcgtcttttccgcgtcgtcggttgttgatgccatggtgatgcccccgtttcacgagttgacgatacgcttcttacgctgacgtaacctacgttagcgtaacttttatgcttgtcaataccgactcacgcgaacactatcacccaatggcggcgatactatggaatccgaagatgagaacgtcacagcaataaggggctcggtgatggtgtattgcacggagtgtgggtttgccaacgagcaaggaaatgccttctgttcgcagtgcggaagcccattggagcagcccgaggccaatccggcggcccctgcttctcctgaacctcccgccgggcgtcctggcgtcgatcacaccaaagcgcaggcaaacgcgatgatgggttccatggacacagcaatgccggcaatatggtggcggcttcggatatcaaactgtacgtgatgcttgccgtgtacgataagcaacatgccggcaccttgaccacgggcgggaagccgtgcaacgcgattggcgcggtattgaagatgcgatgtcgtcatagtcgtcgtacttgcccgtgtggcttgccgcgatggcggcgacgtgtctgcgtatgataggggcatggctgatttttcacacatccttgcaacgcgccccgacttcgacgacgaggaccgcgagtggctgcatcatctcgttgccgattggcaggtgatcgccgatttgagtttcgccgatctgctgctgctggtacaggatggcgatggcaaatacgtggtggccgagcaatgccgtccatccaccgttatgacgctgcgggcggaagacgtggtgggaaacgtcatgccggacgacatggtcggcgaattggacgccgccatgctctccagcgtggtgttccgctccacggtattgagaaccgtgggcaaggcgaccgtctgcaacgtgtacgcgccggttcggcacaatggcaagaccttgggcttggtcgtgcgtgagaccaatatggccacacgagaatccaacggccgatatgagtcggaaagcatcaacgccggcaagcatctgtacgagatgattccgcgaggccaattcccctacaaggattcggtgatgagccaacgccatatcgctcgcgtggcggacggcttcatcatcctgaccatggacggcgtggttcgatacgcagccccgaacgccatcagctgctttaggcgtctcggtctgctgaccaccatgcctggccattacctcagcgaacttggcacacagctattgaaggagaacgaccctgttccggaaaccctgccgttggtgttgacaggcaaagccgcggtcgactccgaactcaacgccaaccgttccgccgtctcgatgcgctcgttgcccttgtatgacaacaacggccgtatcggagcgattctgctatgccgtgacgtcaccgagctgcgccgtcgtgagcaggagctgcagaccaaggacgctacgatttccgagattcaccatcgtgtcaagaacaacctgcaggccgtctccgcattgctgaggcttcaggctcgtaagaccaagtcggatgaggtcaagaaggaattgcaggaggcgcaacgccgcgtgcagaccattgccatggtgcatgagggattgagccagaccgccgacgaggtcgtcgacttcgacaaggtgatcgccaacctgctgcgcatggccgtggacctagccacgatgaaagaccagcacatcgatatcaactacatgggcaagttcggcatgatgcccgctcaggatgccacgccgctgtccctcgtgctgaccgagctcatcaccaattcggtggagcatgggttcgaaggccgcaaggatggccatatcacgatttccgtgggccgctccggcccgaacctcaatgtggtggtcgaggatgacggttccggtctcggctccgaagaacagggtggattggctcgttcttccggttccggtttgggcacgcagatcatcaacacctttgtgaccaatgatttcggtggttccgtgcattgggagccgcgccgcgaaggcggcacccgcgtggtgcttgatatgaagctcagggctgctcaggacgagtgatgcgaagcccgaaatgaggaaaccctcccaagcgggagggtttcctagtatgacgaagcgataatcaaaacatcagatttgcatctgcatggcctgagaacggcgggcgcgcatggcgcggcgcttcagcgcacgacgctcatcttcgctcaagccgccccacacgccgtaatcctgattggtgtccagtgcgcacttcaggcatgcgtcaatcactttgcaggtgcggcacacggccttggcctcctcaatctgctgataggctgcaccggtgttgcccaccgggaagaagagttccggatccttgtcacgacatgcggccttggctcgccaatcaaaagcgctgctcattgcttgcctcccttaaaagccccgtggctggtgttgttccttaagtccagtaccaaggtaaccacgaaccgtggtgattttcaagaggttttgccgagaaaaaaccgaagttttcacgaagcgcactgcaccagacatgccgatgtgccctcgatgagcacggcccggcccgcgttgtcggcatcgatatgactcatcatatccaataggcgagcggggactccggccataagatcggacgttctctccccgcacgggaacacgattctggtattgcaatgctccggtatacgtatcgggcgaatcgtgctgacggcgaataccacgctgacggactcatcggccaacgcatgtgtgaaagacagcgcctgctcgtcggtgcggaatgggtcgaacaactcatcggcgtcgtcgacgaaccacacgatatgcggaggcggtggtgcatccgagctggcatacggcgtgcagcggccgccatgaagccattgcgagctccatacccgacgatgcggggaactgacacgtaccgccaagccatcagccatgctggcgtgtcgagccaatgttttcagcaacgtggttttgccgcgcccctgcgggccgatgacaccgatattgccaccggtgagggataccgtcgcctctcgcaggttgatgccatcgtcggcaagtccaaatcgaatgcgttgcggtgcgtggtcggccacagtccggtcttttacgtgccgggggagtggcgcggtaaacagggacggttgcggcgggcttccgacgaaccgcgatgcgaacgcgatctggcggcacaccgcatcgatatcgcgtgccgttgcacagcggaatgccgtcacctgttcggaatcgttgcagaacgccgcaccgggcattgccggactgaggtcgacggcacgaccatcgccaagcagctcgcatgattgcagacggtcccgaacccgtaaacaaatgctgacggacatattcgccttcatatcggcactgacctgacccatgggattctgcgtacaggcgatcagatacatgcccagtgacctgccgagcgaggcaatacgcaccagacgattcacataatccgggagctggtccttcagggcatggaattcgtcaatgaccacgatcaggcgcggtggtggattgaccatatcgcggatatcggaagcatggacagcggcggacagctgttcacggcgtgtcagttcggcttccagcgcacgcaacgcgcgtacggcatgcgccagatccagatcgcatacgctgcccacggtatgcggcaaccgttcgagtttgcggaacgcggaaccgcctttgaagtccaaaaacacgaaattcagatgttcgggcccgttcatcgaggcgagcgccagacaccagctttgcagcaacacggatttgccggaaccagtggtgccggccaccagagcatgcggcccctgacggttcagatcgagcttcagcggctcgcttccggtcatgccgatcggcaccgcaaggtcaaggggttcaagccaatggcccacaatggtgcgccatggcaggcgtgcgaagtgcagcagcgattctatcggctgcgacggcgcatgacggaggtctgcggcgcgggcatcggcatcgtccgtgataccgatatcgatcgttgcctgttgcggggcgggggtcttctccgggcccggaggtggggggagcgccagcagcagggacacgagacaggcgaatatgcccggtgcgatcatggcggcgaacagccattgcccgtgcaacagcagtatgaccatcatcaatgcctgcgcgatcatcgggcacgccgcggcaagcatggtcaggcgggcgcgcaatggcggcgcgcccaaacggtgcttcgcccgggatacggcggatgccgtgtgggcggaatgtcgcttcgaatcgttctgctgtgatgccatgcttccagcgtgggggaacgcatgccgaaagcgcaagccgaatcaaggtatgtggttctagcttgccgagttatccacatgacattttgcccgtgcatgattggcggtgtaggcaatggtggcgatcatgcgccgacgatgaagccgatgggctccgggaaagcgtcggtcagccttccgccagattgcccacggtgccggccttatgcgtgccgtcggcaagttgattgaacagttcggtgttcttggcgtcgtcaagcagcaccgaggagccaacgccatcaacgtaataatcagggtcggaccagtacacgctgccggagatgccattcgagccggtggcgcttttgaacgccaacgccatggtgagcaacgtgtaagggttggttttttcatccacggtgagtgcgctcatcgcggcattggacactgccacgactttggacggattggccagggtcccactgctggaagcctttttgacgatggccgagatgacctgccgctggcgttcgttgcgtccgaagtctcctcgcgcgtcggcgtatcgcatacgagagaaggacaatgcagtggaaccatccgtcgtatggcatcccgccttccagttcagtccggaataggaatcctgaacatcctcgtcatagcacagttcgataccgcccaaggcgttcaccacgttctgcagaccgccgaacttgatctgcgccacatggtcgattttctggccggtgatctgctcgacgttgcttaccaaggctttcttgccggcaatctgcgccaccgcattgattttcatgtactggttatcgacgttcataagcgaatcgcggggaatggaaatcagcgaactcggcccgcttttaggcttgatcagcaccagaatcgtatcggttctgaagcctgagatattgtccacgccgccgtaatcggtggaaccgtctcgctcgtcggagccaagaatcagccaggtcgaggccggcgtgttgggggtgtcggtcagccagtcgctccggttcagtttgctgtccacccattgccaggcgccgaaaacagaaagaatcaacgccgccaccagtaccgcaatcgcgcataagatgatgcgcaaggcgcgcggccggtgtgccgttaccgttttcgccgttgccgccgccggccggccaagatggctgaacttcgtggacacgtttgctgctggcgatgagggccgggaaaccggcatatccgacggattgcgcacggcgttgcgggatgagccggaagacatccgcgctcgcgacggcggaatgctgcgcggtgcggcggcatccggagccgtgctgcgcgtggcacgtccggttttcggagaaaaactgggcggagtccgcctgccgttgtccgtgacgttggcgcttgccgtggcgttggcgttcggttgaggctcttcgatgtcatttcccgtgacggacggacgggccgatggagcctgacctgactgacgtgaggcgcgggcaggggcgaaggagcgtggcacctgcccggaaggtcgggtgcgtcgatttcccgcaggaatgaagcttggcgggttgatatgcggatccgccccacctgattcctgcgtcataacccctcctgaaactgtcgattgtctgaatgacactttgacacagcatccgccgggtgttcctgcgctatggtgttcctgcgcaggaacggcacaatatcatgtgcaacggcatcagggcatcgtgtccgcgccatagcacacagttccataaaaatgatgtaatgacacgagaaagaatttgacaaaaacgaaattgcatgtgtgtaatttagtccgtatgaaaagctcaataggcaaggagaatcgcatgtggggtgtggtcgacgattcagccgaagagccatggcatgaattgtggggactattccgacctgatggcgatgtatcttggcagcacaaggcgttgtgcgcgcaaaccgatccggaggcgttcttcccggaaaagggaggctcgacccgtgatgccaaacgtgtgtgcgcaaaatgcgaagtgcgtgagcaatgcctgaaatgggccatcgaccatgatgagcgattcggtatttggggtggcatgagcgagcgcgaacgccgtcgatataagcgagagcaccgggagcgggcgtagctccacacacccccttcaagtctggtgcgtacactgggagtttatgagtccgacaggtaatagcgatattcatgaggcgttggccgacgccatgtcttctcgaccatatacgcataggcaggatgtggataccggcattacggctgtgatcaccgttgaggaggatatgcgtttcctccggtctacattgcgttcggtattgacgcagaatgttcttccgggagtcgtcatcatcgccgacgcgaccgggcgcaccagttcgaggataaccacctcgttcgaggtcatcccctcgccatcggggccggtgatggaggtgccgcagtccaagcatgtgattattcacatcgtctcggccaagggcgcacgctccttcggcgatgcggtcagccgggcattggatcgtgccgatctggatgacgctccccgcgcattgtggctgctccatgatgattcccgcccttcggatgactcatgccttgaacgattgcttgaggcgtggcgcaatacgccgggcgccagtgtgctcgggtgcaaacagtgcgattgggaaggctcccatctgcatgatgtcggtatgtatgcaggtcaccacgccgtgcattccctggtggtcgatggagaacccgatcaggagcagtatgacgggcggcaggatgtgtttgcggtgtcgctggcaggcgcgctggtgtccatgtcgcaattcacgcgactgcggggcatcaatgcctggctgaccacctacagcgaatcggttgatttctgccgccgtgtctgcctgagcggcggacgcgtggtggttgtcccgcaagcggagatatcacatcgtcgcgcacggtatgagggcattcgtacgcgaggcggggaaccgcttaaggacgatcacacggtcaatcatgcgatgacggtgcatcgctcccaacagcggtatctgtacacggacctggccatgtcgtcctggtttatcgtctggctgtggaggctgctccgcagttttggcatggccatagccatgatgttcggcaagaagccgtatgaagcatgggtgcaattgtgcctgccatggctggccttggccgatatcgcgggaaacatgaaatcacgcagtctggtggccagacaatcgaaggtcgccgcatcgtccctgcatgtcttgttcgcagacagtcagcagatcaagcagttccatgatcgtcgggatgcattccaatctcagcagggcagagtgctgctcagtccgctggaacgtgcccatctgcggacacgcaccatatatcgctggagtgcggccgtggtgatggcgctggtgtgctttgcggccatcgcggtgatgtattggccggtgttccgttcgatattctccggcggatcgttgtattccgatgtgttgcttcccaccggtgccagcttcacgcaactggtgcagtccgccaccacgccgtgggtgtttggcagcggcaccggcattcctgcgccgcccacgccgtggctgctggtgctgatgctggcctcgttggtcacgctcggccatgtgaccgccgctttggcgatgatactgtttgtggccgcgccgctgagcgcattgtcgttctgggcgctggcgggcgtattcacccgctcggacgtggttcgtgtgctgggaggactgctgtgggcatccaccggcattatgttcggctggtatgcgcaggccaatatgccgatgcttaccgtaatggtgttcctgccggccgcgttcgcattcgtgttccgtgccgtgggcatgtaccataccgaagacccgctcaagccgcgcacatccgttcaggccgcggccatcgccgcactgtgcttcatccctgtggtggccgccgaaccgcagctgctgttcgcgctgatcgtcgtgttcctgatgttcctgctattcgtgcgtcgcaagcgcgccatgctgttgctaattccggttcctgccgcctttgcggtggctcctacgctcgtcaatgcggtgcgttacgccgatttgggcatgtggcgtcaactgttcggcgacatcacggtgccaacgtcatccgccaatgggtcgccggcgtcgctgagtttgcttgaggccgcacagcgtgcgctgggatggcgaatggggtcgactgattatgccgatttggcggtcactgtgctgtttggcgtcatcacgctgcttgctcttgcttcgctggtgctgccgttcgcgttgcggacctcgcgactgatgtgggtggtaatcgtctgcggaggcgcgctcgccctggtctccagccgtgtggccataaccgtggatgccgatggtgtcgtggccggttccgcgcagccgggcatcgcgatgatgatattgggcttccttgcctgcgtgtgtctcgtcgctggtggggcggtgaagcgattccagccgttgcatgcgtctggcagtgatcccgcaccgaaaaaggaccgtctgcatgtgctcatcgtgtctggccgtgtggtgcttgctctgatactggtgtgctgcattggcatccaatgcatgtatggcatcgaacgtcataaggatgcgggactgggcgtgtctgaaaacggcctgcccatggtcaccaccgattatctggaggccggtgccgatcatcgtgtgcttgccgtgagcgcggagacccgcaacatcgtcaactatgcggtgatgcgcacctcgcgcggcgatctgatcgacagctctccggtccagcgggcgcgcctgctgtccggcaagcatgatgcggttgacgaacaactggcccaggcctgtgcctcgctgctgtccaatcccgacgaagaggccatcgcggccatcagcgcgcttggattcggcggcatctacgtggttcccgagaccggcgattcctcgaacgacatgccgtatgaacagttgagcgcgaatatcgccgcatcgaacggcacccagtccctggtcttcacggatagcggcagctactatcgtctgacgctgcgtagcagcgcctcacagcaggtggatacctcatggcagcaacgtgcacagcatagtgtctggaggcacgcctggctgatatgcctaggtgtgatcacggcgttgtactgcttggtcgccatgcctcgcagacgaccgtcctacggattggaggagcaggcatgagcaacaaaacttctggtttcaaacgtgcgatcggcatcgtgctcggtgtgatcaccatgctggtgttgattgcgctgttcgtcgttctcgtcatggcccccatccccaatatctgggtggataaggtggccgcttccgataatgccatcgaccagaccgttagtccgacccagtccgaaacctactgcccggcacctataggattggccgataccggcacgtacggcgacagcgccttccaggccactgtcggcaatctgagcacacaagcgcgctatgcggcgttcggctccgtctacagcgccactgtctcggcgatcgggcaaaagtccagttcagatgacgtaactttgaaagacgccgattcgaccgacgattcctcggtgaaaaccggtgctcagaagatcaatcagggagctcgtctgatcaatacccgtatgctgcaggccgcagctggcaccggcaccgtcggcaccatcgcatcatgggccgatgatggcgatgtgagaggcatatcggcggcatcctgcgtatcgacctcgctcagccagtcgttcctgctctccgacagcacgaccggtaccacacagcagctcatcgtctcgaatccctccaccaagccgaccaccgtcgacattgccgtctggggttccgagacagccgggaaaatggcattgtccacccaatccacgctgtctgtgccggccgagggggagtcctcgatggaactgtccgccgcggtcgatgggcagcatggtctgttcgtgaccgtttccagcaaggagactcctatcgcgtccgtggtgcgcacggtgaccatggatggtctgacaccgaagggttctgatttcgcgctgccgctgccgaccgcatccaatgcatcggtggcgccgtccatcactgccggcgatgcggtcaccgcttatctgttcgccaaggcagacaccagcaccgggctgtcatggattaccgccaaaggcttggttcccgccaaagatgccaccgtcactgctgataaggtgacggcgatcgacttgggagaagctcctgatggggcgttgggcgtgatgtccaccgcagaggacgccgtgtcgttctccgtcaaggccacacgctccggtgactccggccaagccgatttcgcattggtcaatgccggcgagccatccgaattctcggggttggcccttcccgacggagtaaaggcctccatcacgctggccaatacgtccaatgcgcgcaggacggtcaccttgcgcgcctacgatgatgccggtgcttcggtaacctccaaggaaatcacactggatgcgaacgcagcacaaacgattgaagccggcaatctttccggcgatcatggcaccgcggtcgtgctgatgttggaggactcatccaagaaagtgagctggggagcgcggttcagtcacgattcgttgcaagacaaggacatcgccggattgtccgtcatcgacgcttcaacgctgatgcccgccacggttcatgtctgggctcggaacgattcctccatcgtcaagtagaagggtatgctcgccgaagcgtcagtttgatgatgtttcggcggcgatatagctgcgggccgtgccactaccttattacaagtgacacggcccgcagtgttgtcacaggccccagtcggggtcgatttcctcgggcctgcgcccatacaattccgctatgcgggccaccagctcatccctgacggccaattgcagttcgagcttggtaggtgcctcggtctgcaacggcatgcggtagagcacgactcgtgcgggaatgccgtggctggcggggaagcactgggacgtcatattcggctcggtctgccaaggcgtcggatccgaaggcggcacatcctccaccgcgaactggagcggacgtatcagttccggccacgcttggccgagcctgcgaacctgggccgccaccatatcgtcgaacatgccggtgcgagtgcggtaacggggcagacgggtgccgaacatcggggttcgtgtgccgcgaccgtggcggttgcggtagattcgtgcgttccaaggtggctgaagcatggttcccaccatagggcatggcggaggcaacatgcgttaggattggttcattggctgtgaacattcgtcaacgagggaggcacgacaaatggtggtacgttcgtggtccgaacttgatttcgataatgtctgctccaacgccaaggtgttcggtttcgatttggacaacacactggccagctcaaaacagccgatgaagcccgcgatgatcgaacggttctgtgcgttgctcgaccatacggtggtggccctgatctcagggggcggcatggcggtggtcacctcgcaggtgctggatgtactcaccccgaatgccaggcgcggcaatctgcatgtcatgcctacctccggctcccggtattaccggtgggatggcacgcaatgggccttggtgtatgcgcatgatctgtccgaagccaccgtggccgctgtctcggaaagtcttgagcgacatgcccgggaactgggattgtgggaacagcaggtatgggggcctcgaatcgagaacaggggcagccagatcaccttctccgctcttgggcagttcgcgcccgtagcggccaagcaggcatgggatcgcgataacacgaagaaacaggcgctggtcgaagcggtcaaggccgatctgccgcatatgcgggtcagggccggcggatacaccagtgtggatgtcagcgaatgcggcatcgataaggcctatgccgtgcgcaagctgacgcagacacttggcatacgggccgatgaaatggtgttcgtgggtgatcgcatgacgcctacgggtaatgactatcccgcggttgaggccggtgcgatcggtgttcgtgttgagaatccgcaagatacggtacaactgctggatgcactgcttgcgcgattcgatactccagctcgatagtgacgcgttatggacgggccgagcgtatacaagtggtggcatgcgatgtgggcacaggtctgcaatctgctgtttccacgcggctgcgctgggtgtgacgcgccggatgaggtattgtgtgcggcatgctgggccctgttcgcgcaatgccgggaacgggatgcagacagtggtggcggagcccgtatatggtccgcatcgatttatcagggagcggtacgtcgtgccattctcgactggaaggaccacgacgataccgagcttgacggcccgttcggccgcatcatggtgtcgctgctgaacaagacgccaataccatcatcatgcttgggtcatcgcgtattggtggttccggtgccatcatcgcgggcgtcaatgcgccgaagaggacgtgcccatacggcaccgttggccaaatcggtggcaggggcattgcgtgggtacggcgtcgatgcgcgaccatgcaatgccctgagctcctccaccaaggcacgctccgtgcagcaggtctcttcggcacagcgtgcccgtcgtatcaccggtcatgtcagggtgaagcgtgatctcatcggcaatggcgacgcggtgcttctcgttgatgatatcgtcaccacaggtgccactgtgcggcaatgcgttcaggcgtttcagcaggccggcaccaaggtggtgggcgtgctggtattggcggatgccgtggtgcgacggtccgatgacgatatcaacgggtgaatgacatcggtgacgatgccccagatagcaggcgaagcgccgttgctcggcatgtaatcggggtatcgcggattctcggcgtgcaatatggtgatgccggcccgtgaaaccagccgcttgatggcgatttcgtcgtccatgacagccgcaaccacatctccggggactggtgccaacgaacgatcgacaatcagcagatcgccgttgtgaatacccgcattgatcatggaatcgccggccatctgcataacaaacagcgtggcctcgtgcgccatggcctgtgactcggattgctgtgtcatgctgcgcctcccaccctgtattcgaacatctgttcgaatacagtatacggtaggacgtcggacaatatcagcgttcggcgatgtgatatttaggcaggatgatttcgaaatcggcacctcgcgtgtcgtcgaccactttgacggtgccaccgtgcaattgggccgcccagcgcgcgatggacaggccaagaccggtgccgcccgactcggtgccgggacccgtcttgcctttgacaaagcgccggaagatgtccaaacggtcggaaggcgcaatctgggagccgtaattcaccacattggtcacgatggtgccttggttttcgtcctcgtgggcgtcgaccagcacggtggtgccgtcggccgaatgtttcagcgcgttggcgatgatgttggtgaatagctggcgcaggcggtcctgatcgccttccatcgtgatgtcggccggcacggtgacgcggatgtcgtgggcgtggccaccatcggcgatttccaacggctcgatggtctcgtcaagaaagtcggcgaagttgaacttttcgatattcagactcgccgcaccggcctccatacggctcaggtccagtaggaaggcgatgagatcggagagacgctgcgtttgggtgaggatgctctccagattggtgggagtgggctcggtgacgccgtcggccatgttctcgaccatcgcctgcaaagcggaaacgggcgtgcgcagctcatggctcacattggcgatcatgtcgcggcgcattttatcggcatgctcgagttcgccggccatctcgttgaacgagcgagccagcttgccgacctcgtcatgacgatcctgatcgatatccacgcggaccgtgtaatcgccatccgccatggcttcggccacatcgcgcatctggcgtaggggagcggtgatgccgcgagagaagaaataggtgatgcccaaggccaccaccaaagtcagcggcatggcgatccaaccggaccagccgaatttcaggaggaaccagcacatggcaaacgcgatggcagtggcgataacgatcagtgcgctgagttccagcttcagagatgagaacaaatcaaccggcttgacgcgaggtttcatcgcatcaagccgggattgctgttgttttttggatgccatcacgcggtcggcggctcgaaagcgtagcccacgccatgcacggtgcggatggtatcggcaccgagcttatggcgcagcgccttgacgtggctgtcgacggtgcgggtgccggatgcgtcgacccagtcccagacctcttcgagcagcttttcgcgggtgagcaccgacttcgggcggcgggccagcgtggccagcagatcgaactcggtgggggtcagatgcacctgttcgccgttcacggtgacgatgcgctgggccgggtcgatgaccatcgaaccgaagtcgagcagcttctcgttctccgagttcttggcgatgaccttcgcacgctccacgcggcgcagcagcgccttgcagcgggcgataagctcgcgcatggagaacggcttggtcatgtaatcatcggcacccgctcccagaccgatgaccttgtcggcctcgtcatcacgtgcggtgaggatcagcaccggcaccggacgttcggcgacgatgcgtttggtggcctctagaccatccataaccggcagcatgatgtccatgatcaccagatcggggcgtagctgggacgcggcctggacggcggaagcgccgtccccggccacgcgagcggtccatccttcagcggtgatgcgctgggcgatggccgtggcgagcgtgggctcgtcctcgaccaccagcaccgtgcgcggtgtcgtattctgacgcgctgtggtattgagcataaataaaccggttacctttcagcctgttgaccagttcagtcttccggcttcaagaatacaactcccagagccggaacggtgatcttcgccgagaacggacgtgaatgatattcgccctcgaccgcttcgaaggtgccgttgtggatgtcggagccgccgtacttggcgtcatcggtggtgaacacttcggtccacttgccgccggtgggcagcgccacctggtaatcggaccaggcctcaccggagaagttgaccaccacagccaaggtctcgcccttggtaccgatgcgcaggaagctcagcgtgttgtggtcggcatcgtcgctggtcagccactggaagccggccgggtcgaagtcctggctccatagtgccggatgcgccttgtagaaggcgttaaggtcggcgaccatggtctggacctgacggtgctcctgccagttcaggcaatcccaatcgatggaggcgtcgtgatcccactcgccccactgggccagctcgttgcccatgaaggagagcttcttgcctgggtgagcccactgataggcgaacatcgaacgcacgccggccagcttctgccagtcatcgcccggcatcttgccgtacagggaacccttgccgtacacgacttcgtcgtggctgatgggcaatacgtagtgttcggagtaggcgtacaccatggagaaggtgatctcgttgtggtgccacttgcggttgatgggctcctcgtgcagatactcgagggtgtcgtgcatccagcccatgttccacttcatgccgaagccgatgccgccggcggaagtgggggcggtgatgcccggccatgcggtggactcctcggcgatcaccatgacgccggggttgttcttgtacgcggtggcggtggcctccttgaggaagtcgatggcctccaggttctcgcgtccgccgtagatgttcgggcgccaatggccgggttcgcggctgtagtcgaggtagagcatggagctgacggcatccacgcgcagtgcatcgacgtgcaggtcctcaagccagaacagggcgttggccaccaggaagttgcgtacttcgcggcgtccgaagttgaacacataggtgccccattcagggtgttcgccgcgcagcgggtccgggtcctcgtacagcggggtgccgtcgaagcggccgagcgcgaaggcatccttcgggaagtgagcgggcacccagtccatgatcacgccgatgccggcctgatggaactggtcgaccaggtaacggaagtcgtcgggggaaccgagacgggagtcgaccgcatagtagccggtgacctgatagccccaggagccggagaacgggtgctgggccagtggcatgaactccacgtgggtgaagccttcctgcttgacgtagtccacgagctgcttggccaggtcgcggtaggtcagtccctgcctccagctgccggcgtgcacctcatagatggagaccgggccatcatgcgggttggtggtgcggcggtgctgcatccaggcgtcatcgttccacttgtaggtggattcggtgacgatggaggcggtgttcggcggaacttcgtgctgacgctccatcgggtcagccttcatctcccacgtgtaattggcgttcaggatctggaacttgtaggtctcgcccgcgccgattccggggatgaagatctcccacacgccggaggagccgagctcgcgcatggcatgacggcggccatcccaagcgttgaagttaccgactacgcgcacggcatgggcgttcggggcccacacggagaatgcggtgcctaccacctgttcgccgggcgtgccgtctgcgccgcccatcggatcgtcatagcgcagcacatgcgcgccaagcgtctcccagagcttctcgtgacggccctcgccgaacagataggtgtccatgtcaccgactgtgggcatatagcgatatgggtcgtcctcaatgagcactgcgccgctttcccactcggtcctgacacggtagtcgggaatcgtgggctgcttcttagtgccggaagccggcacggtaaccacgaacacgccgttgtattcgtgggtcatcgggtattcgccatcctgggtgaggatggtcacggacttggcaagcggacgcagcacgcggattgtggcggtgtcggcatgcttgccgatgccgagatgcccgccgagaactccgtgggggttgtagaattcagcattgctcgtcgcatcgaggtcgccttgggcgacaggcacggtgacggtatcttccttgatcttcgtttcttcagccatgtcccaaagtctacgtgcgttgaagtcgaaaacgctacattggcgcgtcgaaaatggcgaattcttgcccttttcgttgtgtttccgtggttgtgagcgctctcataggggtggtccagaccgcatggcataattattcgagttttcgtgtgtaagccgtcagttctcggagggtacatgtcttacaaagtcggcgatatggtcgtctatccgcgtcatggtgcagcgaaggtggaggccattaccgagcggacggtcaagggagtgacgcgcgaatatctgcagttgtccgtactctcttccgatggtttggtcatcaacgttcccgtggacaatgccaagaaggtcggtgtgcgtgacatcgtctccgcatccgaagtggccaaggtgttcggcatcctgcggaccccgatcatcgagaaagagatgaactggtctcgccgttacaagctgaacgtcgaaaagatcgccaccggcgatgtcaacaagatcgccgaagtggttcgcgatctcgcccagcgcgatgtcgacgagcacggcctgtccgcgggcgagaagcgcatgctcaccaaggcccgtgccattctgacttctgagatcgccttgtccgagaagatcgacgaggcggaagcccagcgtctgctcgacgtgaatctgggctacgagcccgctcagcccggtgacgacaagcatcacaccgccgagcccgaagaggccgcggccgatactttggctcgtgttgaagccgagaagaagtccaagaagaagtgatttgattgttttgaggccccggtcgtgtccttatgcgatgcgccggggcttcgtgattcataatcgtttgctgccgttcgtctgggcaacgccatcgaaggggactgcatggggtctgtaggagtgctgatagggcaaggttttgacgctcaccgttttgcgcctgctggctcaggccgtgaactgtggattgccgggctctactggccggtgcctgattcatgcagcgaggccgatgccgccaaatacgagggtatcgaaggcgattccgatggcgatgtggccgcgcacgctctgattgacgcgttgcttgccgccgcccgattgggagacattggttcactgttcggtgtcggtgcggacgcgcatggtgccggaatgcatggcatcgatatgttgcaagaagttgtggcgcatctggcatccaacgggtatacgccggcatcggcctcggtggcgatcatcggcaaccgcccgaaaatcggcacacgccgtgctgaagccgaagccgccctgtctgcggcggttggttgcccggtatcggttaccgccaccaccaccgaccatatgggattcactggccacggcgaaggcatcgccgccatcgccaatgccttggtggagaagatataacaaagcccccgctatgaattgaaccgcaccccgattgttggactggagtaattcatgtccgatgatttggaggtgcggttttctatgtcacggaaacgcaggggttcatacgatgtcgagtatatgagaatcgtcgtcgggttgattcgcgatgggatcggcgccaagtcgctcgcccgccggcttggcgtgtccaaggaaaccacgagagaatggttgctgtcataccgaatcggcggagaggcggcgctcatgggcgaacgcgagggcaacaggaaatacgattacgagacgaagctcgccgctgtgctcgaccatctggaacgtgggatgagcaggccggaggtcatggaacgttatggcatcgccagccggacgtgtctgaaacagtggtgccaggactatcgtcgcggagggccggaggcgctgcgcccgaagcccaagggcaggccgaagggcgcgaaatccaaaccgaaaccggctcccacgcgcgaacagctcctcgaggaggagaacgcgtatctcaaggcgagggtcgcgtatctggaaaaagcccgcgccctgctggcgtcgaagccgacaaccgggagaagtcggtgatcgtctcgacgctggcggggctcggccatccgctccggtgcctgttgaaaatcgcgggattggcgagaagcacctactactatctcctttcgcatcccgagccggtcacccggccggatatcgagccgatggtcgctgaggtcttccatcgcacgcccaacgggtgcggccaccggcaggtgcgcatgtgcctcgtatacgagttcggcgtgcgcgtgagccataagagcgtgctcagggttatgcgccgcatgggattgaagtgcgccatacgccgcccgaacccataccgcagatacagctcataccaaggcgatacgggcgcgaagccgccgaacctgctggaacgagacttcgcggccgaccggccgtgggtgaagctgggcacggacgtcaccgagttcagggcagcgggcggcaaggcgtacctcgcgcccatatacgacatgggatccaaggagatcgtggcctgggacgtcagccggcaccccgacctcgcccagcagcaacggctgctcgccatgctcgaggagaagctgcccgaaggcgccgatcccatactccacagcgacatgggctggcaataccagcacgactggtggcggaacaggctcggggaactgggcatccgccagtccatgagccgcaagggcaactgcatcgacaacgccgccaccgagcaggtgttcggccacctcaaggacgagttctacaccggccgcgagttcgcctcgtacgaggagttcaagagcgaactggacgcgtacatcatccactggaacaccagacgacgccagatacgactggagggacacaccccggaggaattccggaacatgtccctcacagcctaatcaggtacccttaataaaccacgtccaacttccggggcgcagttcaaattcgccagcgggggcaagaaaaaatggatgagattacttccgcatcgtcttcacggctttggcgatagcccagaacagggtggaaagcgtcacgatgatgaagctcgggggagcggggaacatcgccgacagcacgagtccggcccaaatcgacaccaagcacagcacgctggcgatcaccattgccttgaatggggagccggccagaatattggcggtggccgcgggcgtaatcaccagtgcgaaaatcagcaaggtgcccactgccggcacggcgatggtgatcacaccggccataatcgccataaacgccacgttcatcagcccgatcggcacacccttggcctgtgccacctgctcatccagcgagctgaacagcagcgggcggtagatgatggccaacaatgccagcagcagtacgtcgaacacggcgaagccgatgatctggccggtggtgatggtcaggatcgagccgaagaggatcgactgcatctgctgggaggcggaactcgacaatcgcgcgaagaacagacccaagccggtggcgaaggccagcacggtgccggtggcgatttcacgctcggaaacgcgcttgcccaaagcaccgatcaccagtgcgccgcccagtgcgaacacgcccatgcccagtgacacgggcaggccgagcaacaccgcgccggtcgcgcccggcagaccgatatgggccagcgcatgggccgcgaaggtggaacgacgggcgatggtgaagtatcccatgacaccggcggccagggcaatgcacaggccggcgatgaaggcgttggtcatgaatggagcggacagtgtatccagccattcgggatcatacgaaaagttgatggtgctcatgtctctgtattttctccatgcctgagctacagtccgttgatgggctgtgggtcggctcgcttgatgttatcgattctcggcgctgttggcggtactgccattggtggcattgccgtgctcgtgatggtgcaattgcgccacttcggctgccgtgtgcatatcctgcggctggtcctggagctcatccggcgtcggggtcacgaacatgtctccctgcggagtggtgaccacctgcacctgtgtgccgtagaggtgggtgagtaggtcggagtcgagcactttgtgcatatcggcgtagtgcgggtgaccgtcgagcaagtagacggcaccggtcagaatcggcaagagcatattgagatcgtgcgcaaccacctggatggtcatgttcagttcacggttcagcttggccagcacgtgtacggtggcgcgctgactggccagatcgaggttggccaacggctcgtcaagcatcagcagttgtgggtcgcacaccaacgcctgggcgatggccacacgctggcgcaaaccgccggacagttcggacagacggtaccgcgccttgtcggcgatgccggtgaactccatcgcctcgagcgctttggctttctgggccttggtgatggggtggatgccgaatcgggtgccggtcaggcccagcaacacggattgttcggcggtgagattggaatcgacattcgccacatagctctgcggcacatatccgatgcgtttgttcatctcgcctgcgggcttgcccagcacggtcaggctgccatgacagagcggcaaaaggcccagctcggccctcatcatcgtggttttgccggtgccgttggtgccgacgatggccgtgaccgaaccggtgggaatggcgaaggtgccatgctgccagatgatatggtcgccacgcttgatggcggcatcgctgaacacgatgcaatcggaagtttcactcataacgcccgattgtggcaaacgatgctgacaatcgttctcaatatcgtgtacggatggtgataaccaaagagaagggttgtgcggccatctcgacaatggtcgcacaacccttctcatgcaaggcgtctattggcattggcacgaatccgatgccggtgtcctttgcttctaactatttgccggagtcggtctggtcgttgccggaggcatcgccggaatcgccattggcggcatcggcctttgccgaatcctgagatgagtcactggatgcggccgccttgcactgacggatgtacttggggtccgtgctggaaccggtgctggccttggagtcttgcgcattggcatcatccgtggcggagccttcggcgctggaatcatcggaattcgcgttgctgtccgcggtatcgccgtccgtggcgtcttcacagccatagcttggatccaccgcgtcgatgatggtgttgatgagctggttgatccaggcgttcagcgtgtcggcgtccttgggcatttgttcggagacgtcgactaccggcacatcggcgcgaccggcagcgccagtgatcatattggtcgcgtcactggcttcctgcgtgttgttgaccagcacatccacgcccttgtcttcgatgagtttctggaaagactgcaggtccgcgggtgccggttcgccgccggaagcggtcgattgcgtataccccttgggcgtctgatctttgaacccaagatcggccatcagataatagaccacgggttcggtggctgcataggtgaggttggagtgggacttggtgaactcggacgcccatgtttccaacgatttctcgtccgcctgccatgccttgagccgcttctggaaggctttcttcttgctggggagtgcctttatatatgcatcggtgatggccgtggccatgctggatcgagcgtctttggagaaccacagatgcgggttatcgccctcgacggcacccatgacggaagcggcggatacgatattcgtggtcttggtcatcgatttggtggcccaggaatcgtagcccgcaccgttggccacgatgatttgggccttggacagcttggcgacatccgaggtctttggctcgaaatcgtgggcatccacattggtggagttcacgatggacgtgacttccacatcatcgccgcccagctcggcggccagcgagccccattgattgagggaggccaccacattgatcggcccggtcggtgcgggaacgctggtcttgttgtccggctcggtttcagcgggggaggtggctgcgcatgcggtggtcgcgaacaacaggacggcgctcaggccggctgcggcgagtcgcgtaagtcgtgtgatttgagtccccatggcacgccttcttcgtgagagcgaacgatatataatcctgacttgttccaacgatagcctatcgtttcgatagaatgcaccgaaactacaggggagggcgttgatgtccacaaaaatcgacggtaagcagattgcggccgaaatcaagaccaaccttgccgagcgagtgaacaagctcaaggcgcagggcatccaaccggggctgggcacgctgctggtgggcgaggaccccgggtcgatgaagtacgtggccggcaagcacgccgattgccaggaagtgggcattacctcagtcaagaaggaactgccggcggacgccagcttcgacgacatcgccgctgccgtacgcgaactcaacgaagatccggcttgcaccgggttcatcgtccagctgccgttgcccaagggcatcaacgagaacgcgatcatcgacatgatcgacccggccaaggatgccgacggcatgcacccgtacaacctcggcgaactggtgctgcatgtgcgcggcgacatttcgacgccgctgccttgcactccgcgcggtgtgctcgagctactcgacgcctatgacattgatctgaacggcaaggaagtgtgcgtgcttggccgcggcatcaccattggccgcacgattggcctaatgctcacgcgcaacgccgtcaacgccaccgtcaccctgtgccacaccggtacccgggatgtggccgaccacatgcgccgcgccgacgtgatcgttgccgcaatgggttcggccggattcgtgacgcccgacaaaatcaaggacggcgccgtgctggtcgacgtgggcgtcagccgcgtctacgacgaagaagccggtcgctaccgcatcaagggcgacgtggacaaggcctgctacgacaaggcctccgcctacacccccaaccccggaggcgtgggccccatgacccgagccatgctcctagccaacgtcgtggaaatggccgaacgacacgcctagagtttcctaggaaatttgggcagagttgcttgtattgtgagtatctgtatgcctgtagggtgtgcgtataactgaatatcgagaaattatccatccactattagaaaccatatatttacatggcagagaacaacactgaagtcaccaaggttgccatcaacgacatcggcaccgaagaggacttcatcaaggcagtcgattccaccatcaagaacttcgatgatggtgatctggttgagggcaccgtcgtcaagatcgatcacgacgaagtcctcctggacatcggctacaagaccgagggtgtcatcccctcccgcgagctttccatcaagaaggacgttgatcctgacgaagtcgtcgaggtcggcgacaccatcgaggcccttgtcgtcaccaaggaagacaaggaaggccgtctgattctgtccaagaagcgtgcccagtacgagcgcgcctggggcgacatcgagaagatcaaggaagctgacggcgtcgttgagggcaccgtcatcgaagccgtcaagggcggcctcatcgtcgacatcggtctgcgtggcttcctgcctgcctccctcgttgagatgcgtcgcgtccgcgacctctccccgtacatcggccagaagatcaaggccaagatccttgagctcgacaagaaccgcaacaacgtggtcctgtcccgtcgccagtacctcgaggagacccagtccgaggtccgcgagaccttcctgtcccagctcaagaagggccagatccgtgagggcgtggtgtcctccatcgttaacttcggcgctttcgtcgatctcggcggtgttgacggcctgatccacgtttccgagctgtcctggaagcacatcgaccacccgtctgaggtcgtcaaggtcggcgacaaggtcaccgtcgaggtgctcgacgtcgatctcgaccgtgagcgtatctccctgtccctgaaggcgactcaggaggatccgtggcagcgcttcgctcgcacccacgttcccggccagatcgtcaagggcaaggtcaccaagatcgtccagttcggtgtcttcatctccgtcgaggacggcatcgagggcctggtgcacatctccgagctcgccaaccgtcacgtcgagaacccggagaccgtggtcaagccgggcgagaccgtgttcgtcaaggtgatcgacgtcgacctcgatcgtcgccgcatctccctgtccctcaagcaggccaacgactccgttgacccggcttccgaggacttcgatccggccatctacggcatgccggccgagtacgacgagcagggcaactacaagtaccccgaaggcttcgacccgaacaccaacgagtggatcgctggttacgagaagcagcgcgaggagtgggagtctcagtacgccgccgctcacgagctgtgggaggagcacaaggagttcgtggccaaggagctggagaacgctgccgaatccgcagccgccgacggccagggcccgaaggaagagaagccggtcgaggagacctccaactactcttccgctgctccgactaccggtaccctcgccgactccgatcagctcgccgccctgcgcgaccagctgctcggcaagtgagtttgccgcgaagctagcgcttagcgtttaacggaaacccggtccgattgggccgggtttcttgtgtttttggagttatccgccaatgactcacctcagtctcgctacgcgagccggatcccctccctgaggggagctgtcggcgataaccggccgaggggagcgccagctatcatgggcaccatgatgcgaataggactgaccggcggcatcgccgcgggcaaaagtacggtggcggcgcgactcaagcaactcggcgcgttgcatatcgactacgatgcgctggcgcatcagatcgtcgaacccgggggagtggcgctgccacagatcgtcgccgagttcggtcctgatgcattgctcgccgatggcactatgaaccggccatggattgccgatcatgtcttcggcgcgaacgccgcgccgggcgcacgtgaacggctcgacgccatcgagcacccattgatctatgccgaggcggcgcgactggagcatgagcaccccgaggcagccatcatcattcacgacattccactgctcgccgaggtcattgacgatattccattcgcctttgaccatatcgtcacggtcgaagctcccgtgtgcatgcggctcgaccgtatggtcgaggaacgcggcatgagcctggaacaggccgaggcccgcatccgccaccaatccagtgaggaggagcggcgggccatagccgatatcgtcatcgactccacccatccattgcccgagatgctggcccaagtgggtgagatatacgcaggatggtgcgcaggtcgctaagatgaggccctatgggattcaatatcgagcgcgcggacaagcctttcgtcgtcaaatcgccatataagccatccggcgaccagccgcaggccatcgccgaactggccgaacgcgtcgaaaacggcgagaatgatgtggttcttatgggtgccaccggtaccggcaaaaccgcaaccaccgcctggctgatcgaaaagctgcagcgaccgaccctgattatcgagcccaacaagacgctcgctgcgcagctatgcgccgaattccgcgaactcatgccggacaacgccgtgagctacttcgtgagctactacgactactaccagcccgaggcatacatcccgcagaccgacacctatatagaaaaggactccaacatcaacgacgatgtggagcgcctgcgccaccaagccaccgcaaacctgctgacccgccgcgactgcgtggttgtggccaccgtctcctgcatctacggcttgggcacgccggaagaatacgccggtcgcatgctcttcctcaaagtcgggcaggaaatcaaccgcgacgacctgctgcgccaattcgtggccatgcagtacaagcgcaacgacatcgccttcacgcgcggcaccttccgcgtgcgcggcgatacggtcgaaatcatcccggtctacgaggaactggccgtgcgcatcgaattcttcggcgacgagatcgaccgcatctccacgctgcacccgctgaccggcgacgagatcgacgaggaaaacgaagtccacatcttcccggcctctcattatgtggccggccccgaacgcatggaacgggcgctcaaaaccattcgcgaggaactcgaagaacgcctggcagaactgcgcaaacaaggcaaggagctggaagcgcagcgcctcaacatgcgcaccacctacgatctggaaatgctcacccaagttggcgtgtgctcaggcgtcgaaaactattcgcgccacttcgacggccgcgccgccggcaccccgccgcacacgctgctcgacttcttccctgacgacttcctgctggtcatcgacgaatcacacgtcactgtgccgcaaatcggtgccatgtacgagggcgatgcctcccgcaagcgcacgctggtcgaacacggcttccgcctgccctccgcgatggacaaccgaccactcaaatggccggaattcctgcagcgcgtcggccagaccgtgtacctgtccgccacgccaggcgactatgagatgggactgtccgatggggtggtcgaacagattatccgcccaaccggtctgctggacccgaagatcgacgtacgcccggtcaaggggcagatcgacgatctgctcgccgagatcaaggcccgtgtggccaagaacgagcgcgcgctggtcaccactctgaccaagaagatggccgaggacttgaccgactatctgctggaacgcggcatcaaggtcgaatacctgcattctgatgtggatacgttgcgccgcgtcgaactgctgcgcatgttgcgcgaaggcaagatcgatgtgattgtcggtatcaacctgctgcgtgagggcctcgatttgccggaagtatcgctggtggcgattcttgacgccgacaaggaaggattcctgcgctcctatcgttcgctcatccagaccatcggccgtgcggcccgaaacgtgtccggcacggtgatcatgtacgccgacgagaccaccgaagccatgcggcaagccatcgacgagactgaccgtcgccgcgccaagcagattgcctacaaccaggagcatggcatcgatcccaagcccctgatcaagaagatcagcgacgtcaacgacatgctcgccaaggaggatgtggacacccagaccttgcttgaaggtggctaccgcaacgcgggcaaggccggcaacacgcacctgggcgtgccggtactcgatcccaacgaggcagacaaacgccacgaggagatcctgaaggccggcctgcccgcgcaggacctcgccgacctgattcgccaactgagcgaacagatgcacaccgccgccgaacaactccagttcgaacttgcggcccgtctgcgcgacgagatccgagacctcaaaaaagaactccgtcaaatgacggaagccaacaagtaaccaaattcccatacccgaggcgggcagtcaggggatgcgttgtcgaccgtaaagacttggcctgagcggctcggagcgtgtcgaacaacacatcccctgactgcctggcgatcagcgctaccggaacggccccaaaaccgtcacatacataagttagtgtagggaatcatggcagaaaccccactcgcatttgaaatcatcaccttcgtggtgctcgcgttgttctttatcgtcgacctgttcgtcatcgggcgtcgaccgcatgtgccctccaccaaggaatgcgtgcagcatatcgccttcttcgtggttatggcgctgatcttcggcggatgcatctggttcttcgccggctccaagcccgccatcgagttctattccggctggctcaccgaatactcgttgtccatcgacaacctattcgtgttcgtcattatcatgtcgaacttcgcggtgcccaagcagattcagaagtatgtgctgtccatcggcatcaccattgctttgattttccgtggcattttcattctgatcggcgcggccctgatctcccgcttcacgtgggtgttcttcctgttcggtgccttcctgatctacaccgccgtcaaactggtgctcggcggcgatgaagatgaggaatatcacgagaacggcatcatccgtaatctgcgcaagatcatcaagattaccgacgactacgacggcgagaagctgcgcaccaccaagaacggcgtgcgttactggaccccgatgctcatcgtgttcctgaccatcggcaccaccgacgtcatgttcgctttcgactcgattcccgcgatcttcggcctgaccaaggatccgttcctggtgttcacctccaacgtgttcgcactgctcggcctgcagcagctgtacttcctgctgggtgctctgctcgacaagctcgtctacctgcctgccggcctgtccgtggtgctgggcttcatcggcgtcaagctcatcatggaggccctgcacggcaataccttgccgttcatcaacggcggcgaaggcgtccattgggtgccggaggtgcccacatggctgtcgctggctgtgattgtgctcgcaattggcggcgcatccgtggcttccgtgatcaagatgaagagcatggaaagcgctgaaaaggcctgaaatcgttagagaatacaacccttaaacccagtcaacacaacaatgtgagcgctcacaacacaccgtgaagaaaacttgtcatgagtcggctcgcgctagtagactgggtttcggcaaatggggcaatcgcgcctcgaaccaaattgaacaagaataggcaggcattcatgcgtaaagccaagatcgtagacaccatcggtccttccaccgaggattacgacaacctcctgaagctcgttgaagctggtatggacgttgctcgtctgaaccgctcccacggcacccccgaggatcacctcaaggtctacaacaacgtgcgcaaggccagcgaagccactggtcgcaacgttgccgcgctcgttgatttgcagggcccgaagattcgctgcggttggttcaagaagaacgccgatggcgaagacaaggttcagctgcagctcggccaggaattcgtcatcaccactgatgacgtcgagggcgacgagcacatcacctccaccaccttcaagggcctgccgggcgattgccacccgggcgacccgatcctgatcgatgacggcaaggtccgtcttgaggtcaccaaggtcgagggcaacaacgtgtacaccaaggtcgtcgtggccggtcctgtgtcctcccacaagggcatcaacctgccgggcgtcgccgtctccctgccggctctgaccgagaaggatgaggccgacctgcgttgggccatccgcaccggtgccgacatcatcgccatgtccttcgtgcgtttcgccaccgacatcgaccgcgcccacgagatcatggacgaggaaggccgtcgcatcccgatcattgccaagatcgagaagccgcaggctctggagaacctcgaagagatcgtcaagaccttcgacggcgtcatggccgcccgtggcgacatggccgttgagtgcccgctggaagaggtcccgctggccactaagcgcatcatcgagctggctcgccagtacgccaagccggtcatcgtggctaccgaagtcctcggctccatggtgaactccccggttccgactcgtgcagaggcttccgactgcgccaacgccatcctcgacggctccgacgccaccatgacctccaacgagaccgccgttggtaagtacccggatgtgaccgtggccaccatggcccgtatctccggctacgccaccgaccacggcttcgaccgtatcccggagctcaagaaccttgacatgtcctccaccggcgctgtctcctccgccgctgtggacctggccgacaagctcaacgccaaggccatcgttgcttacacccagaccggtgccaccgtgcaccgcgtctcccgtgagcgtccggccgccccgatctacggcctgaccagcaacgagcacacctaccactggctggctctgtcctggggcaccgaagccttcctgctcaaggaggactaccacgacaagtcccgcaaggatctcatggtctacacggacaaggtcctcaaggatgctggcaaggttgctgacggcgacaagatcgtcatcctgagctctgctcagggcgatcaccagccgggccgcactgactccatctacgtgcacaccgttggcgcttgcgactgatttcaggcttctggtagctgctgacagctagcatatagcacacgaaagcccccatccaaagtggatgggggctttcgttatctgttatgttgcgattgtgtggtgattgcaatggcccacagtcaccgcggtgatcgagcgtggcgatcagtcgttgagatgatcgagcgtgccgctcttcaggcgcaaaatggcgaccatggtcttggcatccacaatcgtgccattgaccaccatctcataggcatcgtccaccgacaccatacgcacgtcggaacgcggagtctccgggccgatttcctgacgggaagccggggtaagaccggtggcgaagaagattgcggtgtgctgggtggaatagctcggcgtgttcataaaacgggtgaactgcgtaagcttggtggcgtcgaaaccggcctcttcggccagcttgcgcttagctacatcggtcgggcgttcggacgggttgttggcgtgaccggccggaatctccaacgtccaacgatggttggcgatgcgatactgctcgaccagcggaatcatgccatcatcggtgacggccagcacagccacagtgtcgccattgttctcctgaacaaagtagcgttcaaacgaaccgatttgattcgactcataggagacgtgatcgacattgaaataatgcgtctccacaatctgtctacgggaaatctccttgaccggagaggggcgccagggatcgaactgacggtaagtttcgttgctcataagccctcctaacaaaagcgatacatcgaaactacagcccattgtaagcggtgaaaccacgcaggagaacgggcaacacacgggtgcgccgtccgcgatatcgacgtgtttcgcctgtttcaccggggggaatggaggattggcgcgtgtcttgtgtcgcaagagtcgaattggtatgctactctcttcagagtgctttggcacgccctcgtatcccaattggtagaggaagcagcctcaaaatctgcgcagtgtgggttcgagtcccaccgagggcaccaaaaagtccgggtcatacggcatcacgatggcgcggggcgaattattcgctccgcgctttttcgtattctcggcatcgtctggcctcacgatgtagcgtggaccagctactccggcaagttcttgggatggggccgcattatcaacctcaacatgttgttgaggttgataatggtctgatggcatggtgacattgttcgtcacgaggtatgcaacagagacattgaagaatgcggataagtatgcaagatcgtcggaattccacttaactttgcctcctagcttcaggctcaaagtagactgagtgagatgcatggctgaggctaattcggtctgggttaccttgcttcgtttttttaatagccatacattttcggcaatgatctgactcaaggcggcaggaagtccgctgtcgtgcagttctgtctgagcgttctcaagtactgttcgtttcctcatatttatattttaagctcattgatatcgatttgtccaatattgtgttattgtatgagtgtggtcaataaaactatggaaaaattcatgggagaacgagtggatgctcttcgacgcaaagccaatatgactcagcagaggtatgcggcagaggtattgcattgctcgcaaggcaccgcttcgacgaaattggctggaaagactcgcatgagttcgtcagatgtgttgaacagtgcgaaggccttcaatgtctccacggattatatttatggactttccgatagtcccgagcctggatgtcaagaaggggtgacggcatgagcgagagagtgttgtggcttcggttgtgcgtgaccggactgactcccgagtgcggggagattgtcggattgcgcatcgtcgacaggcaggcgcatcgcacggtgttcgacgcgttcttccaccccgtcagggaagacggctggaagagcgtgccggcaggaggggtgaacgtgaacctggcgaaccgtttgccgttgaacatctacgtggatgggatcgaacggatcctatccggtgcgacgctgctgcgcggagagcacgtggcacgcgacatccggttcctgcgcgccgccggcgtccgtatcgaggaccaggtcgtggagcgcagcgtcacggccgaacatcataagagacttgcgtcggggattgccgtccccacgcgcaccgggaaccgggcttgccggcccatcccggtgggatgaacaaaccatcccttacccgaaacaaacccatccaccacccatctgcagcgaaaagagagaaccaggaatgccaaccctacaagcgcgtgcggcccacggcggccacagcggatcgacgcccctcggcgaccacggaagcgacgtcgtggacgaacccgtacgcgtcgtcacaggtcgcggcggcgagcacgatgccggacgagagccctgcgtcgaacagctcgccttccgtgatccccgtggacagcatccaacgcagcccatccatgacggcgggatccgtgacattacggaacagaccatcggcgacggccatgcgataggccagccaggccagacgcgcccgccgcgcgagcaccgtttcgtcacgggccagcgcctcgtaacgcagagccgcccggaccgtcacgatcggggagacatggagacgcaggggcatcgatgcgccctgcaggaacccggatatccggtccaccgtcatgagacggcggcggaggacgggggagaagcccgcatccgtgttgtcttccatcatgcccgccgatcgtttggtcttgacgatatccgttccatccatccacgcgtcccacaggtgatatcggctgcgcgggcaggcccgaaaaagagaatgcccgcacgcgaattgccgttcgcgtgcgggcgatggtcccatcctttacccatttgcattgccccttgccggacgaatccggttcgggcgagggaaccagcagaagccaaccccaccaatcatcacatcagaaggagccggcaagaccgaccccgaccaatcgtcggaccagaagaccaatcgtcggaccagaagaccaatcgtcggaccagaagaccaatcgtcggaccagaaggagccaatcatgaccaattcttacatcaaccccacccagccgaacaccggcgaaccccgatattcacaggatgcccccgcatggcaggacgtggagatcgtcgacgtgcccgccgtggaggagccggactcggccgagggcgcgcccgagccgatccgcatcatagacgagccggaaccgggggaggccacggcaggcgacgcggtcatcgaatacacgcgcgaccacctgcccgtcaacatgggcgtcgacacgaaccacagcgacttcacccgcgaacaggccgaacagctcgtcggcgacatccaggaacagctctacgagaccgcgaaaagccagaaaagcctgcacgacctgatcgcccaggcgtacgacgggcgcgcctggatcgccctcggataccccgcgggactgatcggctggaaccagctatgccaggacaggttcaccgccgacgccgtccgcatgaccgtccagcaacgcaccaacctcatcctcagcttccaagacgacccgatcagcaacgtggccctcgccgccgcgctcggagtgagcgatatgacggtcggccgcgcgctgaaaaagaacgcgaaatccccgaagggcgcctccgcgaagccgaagccggtcgtgggtgcggacggcaaacgccacagcgtgccggagctcacgccggcggaacgcctcgaactcgacgcgaagatccatgacatgaacctgcccgtcgaggagggcggccagggcatgacccagcaggagatcgccgccaggctcgacctggcgcaatccacgatctgcgcgagcatcaaacgcgagaccatgcggcgcatgagcgagggtctcgaacccgcggcccccgcaccggtcgacgagaccggcgcgatcggcgtgctgcccgacgacacggcgatcgatctgggaggcgaccggctcgccgcggacgacatgaacttcgtggaagcgttccgcaccgccgcgggagacgcgaacgccggactgacccgcctcgtggagctgatgagctccgaacgctggcagccaggcagcgagaccgtcgacgagatcgtcacccgcgccggccgcgacatcaagggcgtgctggccaacgtgggcccgttcatgcgcctcgtcgaccacgacctcgaggacatgtggcccgccgacgagaacgaccgcagccgcgaccaggacgaggtcaacggcctgttcgaccagatcctgaccgtcgcgtcggaatgcgcctgacccgttagcagagaaggccggccatgagggccggccggagaggaaccggtatgaacgacaagaaaaccaaggaagtggacgggcgggagagcgtgagcatgctgcccggcgtgacggtgggcgtgatgatcgcggtcatcgcgttcgtgctctcgttcgacgcgttgaggctcgtgttcgtgtccagcggcatcaacccgctcctgtcatggggaggccccctgtgcgtggacggcacgatcctcctgtgcacgtgggcgacatggggattccgcaaaggccacatccgcggacgctggtacccgtgggccggactcgtgctgttcagcctgttcagcgtgacgggcaacgcgttgcatgcatggctcaacgccggcggcatgctccccacgtggggtgcgcccgcgatcatgagcatcccgcccatcgccctgctctactcgacgcatctgatcgtgatcatcgccggcgaccgccaggacaaactcgccaggaccaccggcaaggccgccggccccgatgacgggcacgccggacccgccgcagccacgccggaaacggccggcacggaaccggtccggacggaaaacccgcgggccatccccacgccgacggccggaccggagccgggcaaggccacggaacccgcgcccgccgacccgctggaccgttacctgttcgatccgccggccccggcggaaaccgacgcgaatcggggaaagaaggaggatccggaggacatcccgttcgaccaggacctctcatggccctccgtgacgtccacgaccacgacgtccgcaaggcccacggagtccacaatccacatggtccgcatggaccaggcccatgcggaccaggaccgcatgggccggaaacccgagatggatcccaagggccagccgggcccggaggcagggggccatgcgggccacgccgaacctgagcccgcggaatcccacgaaggggccatgtccggcccggaccgttcctccgacacgggatcggcccacgatgccggcccaaaagccggtgagtcggcgcgcaaggcgacggccggcttcgaccccgacgaatggctcgcatgggccgaccggctgaaggccaacggcgagacggtcacctcgacccgggccgtggccgacggtctcgcctcgtccaccaccacggccaaacggcgcctgcacacgctgcgccgcgagcatcccggaaggttctgaccatgaggaaaagcgatgaaccgttgacggacacgctggtccgctgcctcgccgaccccatggacctgaagggcctcgaacgtctcgagaacgacggggaccaagccggggccaggctcatgcgagcccgcctcgccgaccaggccgccgtccggctcgacgccgcgctggaggacaaccgggcgcgcgtgcgccggcagctgggccgcgactgggcatgggccacggacgaggtcatgagcgacctgacgatacgcaccatccgtcggctcgactactggcaccgcaccaacacggaccgggccgagggaggggcgacgagcctggccgcgttcgtcaaccagctcaccggcaccgtggtcggcgaatggttcaaaacccaacggcccaaacaccgcacgggcatgacccagaccccggaacggcgcgcgggaaggctgaaaccgcccacggacccggacgaccggacggcgtgggaacggtggcgccggcacgagcagaccctcgccgactccgacgtgatctgcgacgcatccgacatcttcgagggacgcgacggcgacggcgagagccccggatcgcccgccgcgggcgaccgggaaagctaccggcaatgggacggcgacacggcggacgccccattgccggtcagtgccggatacaagacggacatggaggccctcgccctcgcggtccaggccgaatgggggctggccgcctggaaacggatcctgacccggtgcatgacctcgaaccgcgcccgtcccctgctcagggagatccgccactggctcgaggcccaccacaacgggaccaccccgagactggaccgctacccctacctcagggcatgcgccggcacaggcacccgtaatcggccgaaaaccggcgatgggcgagtgaaagaacaaacgaaaggacaacgggaagccggacgacgaggcccgcgaaccgtagaggaacgaaaggaacgaccatgatcacgatgatgccggccccggcgggggccgaacccgacgccgtcaccctgcagatccccgcgatccccatgacaggggagcagacgtcgatcatgctcgacgcgacgttcgacgcatggaggatgctctccggcgagatcgacgccgcccgcggcgacgactggcaatggatccaggagatcctcgccctgcccgcgcacacccggtacatccgggccgcgggcgacgaggccatggtgtgctcggcggcgatgcgcgagacatggcccggcagatggcatgatctgttgcgcgcacgcgtgcaggacgtcatcgacgcgctcgtctcatatgagatggagatacgggatctcgaccccggcatgttcgcgcgcatgccctcgccctccctgtgcgacagggtgcggaaacgccacgacccgacccggacgacattgggcatgacggtgcaagagctcgcccgatgaggcgacgggaaaggaacggaagacgatgcggatcatcatcgacggacacggcaggatcgaccggcaggccatggccgtggaacgcctcaagaccatcgacatgacgccggccgggggcggggacgcccaggactgggtaggcgcatggctcgacgggttcgaccaggcgctcgacctgtgccgcgccctcgaaaccgccctcgacgccgacatggggaaggagctgtccggcgatgcgcgatgacggacacgaggacaggaacgaggaagccatgggccgcgccgccgcatcggcgggagccaggtacggaagcctggaacccaccagcaaggcgttcgacaggctcatgcaggaacacaagaaggaacgcgaaacgaaaggggcaagaccatgagctggcaatgcacgtcatgggcgctcagggaggcgcccgcacccacagccacggccagactcgtgctcatcgccctggccgaccgctgccagcccgacggacgcagcgcatggcccaccgtggacaccctgatgctcgaggcgcacacgagcgaatcaagcgtcaaacgtgccctgaaggcgctcgaggagacgggatgcatccgccggggcaaccagaagctcgcccaatgggacgagcacggcaactacgtgcccgacccgtaccggtccgtcgtctgggaatgctgcatgaacgtgaccctcgagcacgtgtccgagaaacccggacgacaggccagggaggaacgcgccgaacgggccgaacgtgacggcgacggcaatgccgaacaggccggaaaagcggacagatttagaggtgtcaaaatgacacctctggaaaacggcggaaacaagccaaaatctaggggggtcaaaatgacacctctaaacccggaaagggaagccaggggtgtcaccagtgacacccctatagtaagaacaaatacttctaaacaaatatcccctttgcctcctacggaggcatctccccggaccggggagagccgcgacgggaaaaaccaaaccgcccacatcatcgaagccgcatccgcgccggacgaggcgaaccgccctatgggtgagcccgacgacgaacgctggcaagacgccggccccgaaccggaagagcgggtccccgccgggatacgcgccagatggatcctcgaccggctcgaaaaccgccgagccgccatgggcctgaccccgaaaccggcaggccggcgggacaccgacgccgtcactcggctcgtcgaacggctcgacgccgccggcgaacccgacacgagcgggctcatggaacgggtcctcgaccacgcgctcgacaacgggttccaggccaaacgcgtcgacacgggacgccgcttcgcccgcctgttcgacgaactgcgcgacgacctgacctgcgaccagcgaaccctcgaacgccgacgcagggagcatgccgacgccagccaacccaccggaagcgacacaggggagagccggccggcggaaccggaatcctacgagacccgggcgcgccgcatgctcgccgaccgcatcggcgccgacatcgacgcgtccaccgccatccgcgccctcgccgacaggctgcgcctcgaccccgacccggacccaggccaagccgcacgctacgccgagctcgcgctccgcgccggccgcaaaacccgggccgaacaagcccgccgggagagcgaacgatcgagggaactccacgactaccgtgcctcgcacggcggcagctgcttcgccggcaactggcaacgggagcgggccgcatgacggggttagccgatatgcccgagcccgcggacgcatgcgtcctgcgcgtcgaactccggcgtgcgcaggaccatcgcatccccgtcgccggccctgcccatgcccacgatcgtgtccccggtgcgccccgtgttcgagacgactatcgcctgcacctcgccggtcccggaaagcccgtcgggaagcgtcgcctccgtcgtataggagaccagacccgtatcgaaccaggagaaccgaggcccggaccggtcgaactgccaattgccgacggaaatctggaagacggcgacgccgagcgcgatcaccgtggcgatggcggcgatatcggaaagaatcctctccgccaccgtcaatatgacgtccggacgtcccttcttctcgccgtttccccgttccgccgacctgccgatgatataaagccattgcttgttggtcagggaatccgcctcggccttctctgcgggactcagaacccgcttcccgtctttttcgctcatgtcgctcgaatctcctaaaaagaggaacctttatgaaagtcatcctattcgtgaccatcatcgtgctgggaggtctatccctcgccacctggctgtgcatgcatctggaagaccatctggaatggagggaatggcacgtaccccggggcacggaattcacaccctgtccattggaatacggggaacatgacgggctgctcctgacggacgtggaatacgccacctgcaaggacctgctcgaggtgcgctacaccgtggagaaccggaacaagggccagacaccggtccgcaacgacctcatcctggcgttccagaacggcatcggactcaggaccgtgtccccgacgacctggaccgtgatgctcgagggagcccatgcgcgaatgacccaatcattccggctcagggaccgggccacacgtcccgtgatccaaccggaccggacctggtgacagccgattcccttcccgacgaatccatcggggaacggccgcttcctccttgtaaaaaataaaccccgcgccgtgcggccgcggggctctcgcatcgtttcctattccatcgctttcggacgtccgggtctgagctcgcgggtctgcgcccatgcgcgaaccgcatcctcggaatagagggggccctgtgaggtctctatcaccggcttgggaaaggattcgatcctgggaaacgcgtacgccctctgtctggtgacgccggtcatgcgcgcgatctcggcgtagcccaccaccggcgggtataggggttcgcggtttcgcgccacggcgtcggcccattccctcgcttcgagtccggtcaccgtcgcgccgggcatgttctcttcgaggagcgtgcgcgccttggccagcgccgtctccccgtccggggcgtcgacggcgagggtcagtccgccgcccgtgtgcccggggtcgaccgccaccgaggccccgtatcttccgagggcttccatgaggtcgaacgccgcgtcctcgtcgagtctcgccttgaagtcaagggaaacctgccattctcgtgctctcgtcatgtttcacctatccgatgtattgcatggcgtgcgccgggagatgcctccatgggcgcacgccatccagccgccctagcggtcgaaggttgatgggggaacagagggtgtgctaatcttggaacccgccgcgtctcaggtatttcaagcaattctcataccatctggcatccgaaggtgtcttgtgtatgggaacgcccggcttcgacttgtcgggtgggtagcacatccagcctttcttcttggcttcgatgcgccatccctgttccttgagcttctcaaggagcggctctgttcttttatcctttatctgcgataatccttcgactatcagccgtcagcaatatttttgctgacggtgacaacaataacgttgtttattgtcattgtcaacattttgttttggggctgcggacacgaagaaagatcggtcttgcgcggcggaggaatcccccgatatagaaggggccacgggtggcatgggcgaaggggccacaaggcagggccccggagaggcaaggagccgcacatgcaggaccacaggacggaaagaccggccggacgagtgtccggaatcccgggagggaccgcaccggaggcggggacgccatgggcatgacgggtttctcggacgccgagatggcattgctgtccggactggacgccgggacgacgcgcccgcatgccccggcgagcgacgccggcagggagggaagacccgcgccgatgagcgtggtgctcgcccagaccatgcgcatcaacgcactcgaggaacggctgcgacggctcgaactgagcctggcggacgggaccacccgatgagcgcgggcccgaatcccgtcgaccggctcgaacaggcagccacgcagttcaagaacagcggcgtgatccagctcgcggtccagggactcctgctcgaaggcgtcgcccgcgacctgcgccaatgcgacacggccaccgtcggctgcgtcgaactgtccgcctggctgaaccgggggatacgggagctcgaacggcgcaaaaggatcgtggacgcgcagatcacgctcatcggcccccaacacggggaatacacgagatacacgaagtacggaaggaacctatgaacaacgacaccggcggcgaccaccccatgccgggcacccgcatgcgcaggctgttcgacgagaacctgtccatgatcgagaccatgacgaggatcgagatcagacgtctgggccgcatgccccgcggcacgcacctcggccaggacgacgggaaccccgtcacggacctcctgcccgaccggtacctcgaccggtacgaccgcgacttcctctaccgcatgctcggctccacgatacgcctgcgcgcccgcctcgccgacccgaagactgaccatgcggcccgcagcgtcatcgaggagatcctcatcagccgggccgtccgtctcatcgccgacgacgacaacgaggagggcagcggactcgaggcatggctcgaggactggctcggcgacctcgacatagaccgcctgtacgacccggcggccgacgaggccacactcgcctcgaaccccgccaccggatcgggcgacatgcgcttcgaccactggttcgaggaccaatactggaccgacgagacggacggaggggaatgatggacgacgaacgccgcaaggccatcctcctcgccctcgcatgcctcgccatcctcatcctcctgatcatcgaatgcgcgatcatgccgcgaatgggatggctgtggatcatcaccgccgccctcgacctcgtcctgctcgccatgtgcgtcagacacatcatccgcggaggccgcaagtgaaccccgtcaccggggccgtgccgcccctcatcgggggacacggcatccgcttcgaggtcgaccggtggacatggaggcgactggatgcggcgaggttcgacggggaacgccgccacctgctcgccacacgcggcagaccctggcacgccgacccccgacacggcggggatacggacgcgctcgagacctggcacctgctcgccggccgccaccacggcggcggcatggggctgaccgtcaccggacccggcgggaagctggacgtctcctgggaacccgacggggccatcccaccggacggcaggttctacccgaaccccgacccgtcggccgcatacccgctgctcgaactcgaacgcgccggcatcatccgcccggtcgaacccgccatcaccgcctacggaccctacgggcggccgacccgcctcatggaagtcaccgaaccataccataaccccatgctgcgcgcgctgcggatgagatgagaatggggcgaggacgccgcctcaggaaagagcgggacccccgtcacgccacatgggaacggcggaagactggtcgggctcaggcatcggccgcccgaaacccggcgagccatacggcgacgcccatgcgggcccggagggatcatacagcccggtgaccgcctgcgaggcgtactcgcgccaggagagggattcgacggtggcgacgagcattcgggccggcaggaaccttcgcatctcgtccagaaaggcgtccgaagacaacaccgacgggatctcacgcagccggcctgcgcgcgcctcccattctccgacctccccgtattccccagccttgagcgtggccatccggaacgcccgagacgcatccacgtcggccctggacgacagccagcacatgtcccacaggtcacgacggcggatatgggaggagcatgcaaacgacagaagcttgtccgcgagtatctcggtggggctttccaccgccaggatgatgtccccggcgatcgccgacacggagggataattgaccctgaccggcctcgtctgcggctcatgcgccggcaccgatgcgacctccagcttgatcgactggctcggcagatcacgacgttgcgccgccgtgcggatggatatgcgccatctcctcaccaggccctcgtcccggaccggttcgcgaaccttcacctgcacgtccggggacatgccggcgagggaggacctgacgcattcgcccaacccccgaaggtcatcgacgccgaaacccgtgccgccggcgaagtcgaggtcctcgctgtaacggggggacccgtggcacagacgcaggctcgtgcctccttggaacacgatcgggccgaagaagccgccgtcctgcatggcggaaagtatccggtaatgcagcagttccttctccaccacgggaagcagggcacccatgccttccgaacgcgcgatgcccgccgcgaccgccttgtagtcgaacgccatgtcactcccatccatcgtcgttctccaattcatccatgtccacgagatccaggttacggcctgtggccttcaggtcccgatacgcccaacgtttcgacgcgagcggcgtcatcccaccgtcacgcggcacgaggttggggagtatcctcgaccagtcgagcgcgcagtgcgtgaactcgatcgtcccatatggggtcacggccaagccctcacggccggtggtcatgaacgtgacgcgatccaccgggatctggctgatcacgccccaacggctcagcgcgctctccaggctctcccacaccagctgtcgggggcgcagccggcgtgcgacggtatgcagcgtcgcctccccgagatgcgccgaccaggcgaacgcgtacacgccgcgcgcggcgcggaccagcacgttcgccgctaccaggctcgacaaggtgcggtcgagcctttgtcccgtttccccgagaaccagcgccagatccggcttgcgatacacgtgcacgccgaaacccgtgtccatatccctcaggcggttcatcgccaactccctacgcatgaacataagtatacgtgaatcatcaaaaaaacgcatattcacgtatacctatgacgtggatccgattatcgcggccggcgcgggtgacccatgcgaaacgcaccggccgacaggaaaggaaccatcatgacagacaccgaaggcacggaggcgagacgatccgacggcgaggagacccagttcatccaacccatccgcgactacgggcgcgccgagacgaaaccgctcgacctgccccgcgccacgatcggcggataccgggccgacgccgtggaacgacgcgtcgccgaactcgaacgacgccgcacgctcgaccaggccgagatcatccggctcaaacgcgagaaccacgcgcggcagaccgagaacggggagctcaaccagcgtctgaccatgctccgggagcaaaacaagaagctcgaataccaggcgtcgaacccctacgagcacatcggcgtcgacatgcagaacatggtcaacggcgccaaggccgaacgcaaggccatcctcgacaaggccgaaacggaagccaggaccatcctcggcaaggcgcgggccaaagccgagaccctgaccgccgaagcgaagaaaaaagcggacgagcagatcgaacaggccacgcggcgcaaacaggggatcgaccaggaagccgacaggagaatcggcgaaagccgcgaacgggcgcagaagctcctgtccgacgccaacaccgaagccgaccggatcctcaaaacagccgaggagaaggccgcgggaatcgacgcggaggccaaggcaaggatcgcggacgccgaccgacgcgaacacgaggccgcccacaccgtggaccaggcccgccggctgctcgccgacgcggccgccagactcgcccgccccatgccggaactcccggccacgaacccccgcgaatagaaccggccggcgcgagagtcagagaccgtccgcatagccgatcacatcccgctccaccgcacgcacggcatcggcgccgatccgggccacgggaacgctccacatcgtgtccgaccgcgcgttgtacaggcccagacgccgcaccctgagatactcgggatgcgtggaatgcaggccgagccgccaatagacgagcagctgcagcgtgtacgtcgggttcggcggccaacggctcaccttcagatcccacaggccgtcggcggtgagcaggtccccgtctccggacgtgacccggtccgtgtagccgccgtcgaacgtgaacccctcccacacgaccggccccacccggtccatgaacctcaacgtgcgcgccaccatgcgccgcacgttatacaccgtggccggccccggatcgatgaccctgcccgcccgccacctcgccgggccccgacgcgacgccgcgtcgaacccgcacagcaggcacgcggcccgcaccgaacggtcggagaacccgtccaccatggcgagcagccgttccgcatccgcagaccggcccaccagacgcgcccccgccaacggcacccggaacgcatcccgcgccggcacgccccgcgccacacgggacaggtaatccaccgcgaggcccgtcacgtccgccgggacgtcctcgaacgcatacaacggcaccggatcggccagacgaacctcgtcgaacagggacaacggcagatacccatccggcggctgcgccacccgacggatacgcgacgtgaccgccatacgaggcgcatgcgccgcctcatccgcctcacgccgcgcgtcatccgcctccatctccgaaggcgaacgcatgtcgaaaccacaaccgtccggaccgatcaccatgccaccccgcttccgcaccatacacccgggaatgcgcgcggggatggcgatagccgggaatgacaccccagcataaggcgatgaatatgctatacttgagggtatcaaacttatgggtgaaaagaagggaagcggaatggtcgggaacggggattacatgctggccgcgctgaagcgctatttcgggttcgactcgttccgcccgggccaggaggaggccgtcggggcggtcatctcgggccgcgacgtcatggccgtgatgcccaccggcggcggcaagtccgtgtgctaccagctccccgccgccaggcccggcacgttcaccctcgtcgtcacaccattgagggcgctcatgcgcgaccaggtgcggcacctgcgatcacgcggcatacccgccgcgctcatcgactccggcctggacgagaaggaacgcgccgaggtgtacgggcgcgccctgtccggcgaactgcgcatcctctacgtcgcacccgaacgcctgcacgcgcccgacttcgccgacttcagccaccgcatccgcatcagcctgctcgccgtcgacgaggcgcactgcgtgctgcactggggatcggacttccgacccagctacatgcgcatcggcgaattcatcgactccctgtccccgcgccccgtgaccatggcgctgaccgccaccgcaagccggacgcaggccggggagatccgcgaactcctgcacctggccgaccccgtgacggtcacgaccgacgcggaccggccgaacctgcgcctcacggtggtccgcgccaggcccggcgaacgcctcgaggccatgatcgcctgggcgaaacggcacaagggcagcggcatcatctacaaggagaaccggaaaggctgcgaacggctcgccgagaccctgcgctccgaaggcatcgacgccatggcgttccacgccgaaatgagggacgcggacaagaaacgggtgcaggacgggttcctcgccggccatccgcgcgtcatctgcgccaccagcgcgttcggcatgggcgtcgacaagcccgacgtcagatgggtcctcaacgacgggccgtgcaaaagcctcgaagcctactggcaggaggccggccgagccggccgggacggcaagcctgccgacgcgatcctctactggagccccggcgactggcgatggctgcgccacgccgcatgggaggcgaaaagccgcgccgaggaatccggcgacccctcacgcatcagggccgcgcagctcatggactcccgactcgacgccatgagcgcatactgcgagacccgccgatgcctgcgccggaccatcctcgccatgttcgacccgcccggcaccagacgcgacgactgctccaactgctccaactgccgggacgacgggcgggagatcgtgaaacaaccggcgtcgaacccgtaccgccggcggcggacggcaccggaaacgggggagggacagggcgagcccatgggccgcgaatcgatccgcatcgcatgccggtacatcgcgaacatccaacgcgagctcggccacggcgtcagaccgggcgtgctcgccgccgccctgcacggatccacccgccgcagcgtcaccgaacagggactcgaactcatcgacgggcacggcgcgttcgccacgcgcagcagacccgccgtacggaacatgatcggcaccctcgaggccatccaggccatcgacacccgcaccggcctcgtcgaacccggacccctgttcgacatctacctgacaggaggcgacagatgagcggcaccggcaggaccatacccatcggcgcggcggaactacgcgcgatcagggaacgggaaagcgtcctcgaacagaccctcgcacggctcaccggcatcgatatgacgaccatcgaacggatcgagaaaggcgaaaccccgctgaccacgctcgaacccgaccagatccgccaatgggcgaagaccctcggcatcaaccccgcccgcctcaccggagagacgccccaaacgggggaggacgggaccaccgtgatccggaggatgcgcacggaacggggatggagctgcccacagctcgccgaacacgcgaacgtgccataccggagcctgcgccaatacgactccggggaacgcgacaccgcgaacatggccgccgggatcctcgcccgcgtcgccatcgcgctcgacaccagcatggaaaagctctccggccggcccgaaccggaccatgccacggacgatccgcccgccggatggaccggcacccgcctcgcctggcaccggacgcgacaagggctcagccaggccgaactcgccatccgggccggacagaccacgcagaccatcggaggcatcgagacccgccggtgggccaccggcagcaaacgcagccgcatcatcctcgacctcgccgcaggtctcggcatccaggcgctcgacctcatggaccaaacaccggaaggaaaaccacgcatgaacgaccccaagcccgcgaaaacggaacattcggccacggccgacgacctcgtctaccgcaaccacgtgaacgcggccatcgaccagctcagactcgccctccggaccgccgacaccggcgaacggatccgactgctcaccggagccctggccaataccggcaacgccatcggacagctcgcccaattcgactcggacggcagagcgcgcccgccaaggaaatgaacggcgggccgacgaaaacgattcgagagaaaacaaggaggcggggagaaccgtccacggccctccccgcctccctcttctacgggcatcccgttcacgccgaacggagagggatgaacatcctgcccgaccgttcgatgtggcggaacccgtaatgctcgtagaagcgcgtggccctgtccgaggccggctccacgagcaacgccttcgcgccgactatctccgccgcacccatcgcccgcatggcggcgtccctgagcagctgtgcccccacgtgcatggtctggtagcgcatggccacgccgagcatgcccagaaggatcgccgggatcggatccgggctgttcctcctgagccagccattggcctcggcgtggccgatgctgtacgcgctcaacgtgtagaacccggccggcgcgccgtcgcagaacgtggcataggcgaccgccgtatgctgcttgccggcatttctcaactggttccgcagccagtcattgacaaccggcaggccgcagtcgaaaccgtcggcgtcgtcctcggcggtcagacgccgcggcggggtgaaatcggtcatttccagatcggctcgctctcgagcagccggaccatctcctccggcatgggctcgtccagtgcccggacgaacgaatcccacgcctcgtcatccaattggaggacatgagactcccggatgtcccggtcggcggcgacgagcaggttggtcaacgcccattgcgaggtgctgagccccctgaactcggccgcccggtcgaggcgttccttctgtgatggcgtgagccgcatctcgaagcggctggccttgctggtgatttccgtcatgccataaccgtacggcgtttgtacgtaagagtcaatgaggatctgttgtcggacgcggacggccgcgacggcggatgtcggatgggccgttcgtgtcctacgcctcgggctccgcgtatgcgatcgctgccaaggcttcgggcgtacgtcggcaaggactcaggggctgaccagttccaccgctgaaacgcgatgggggatgctgtccgtcctcattcgtttatatacggactgacggcgaatgctcttggggtagaacacgttgccgttgcaaaggcccgaccgcatccggttcccgttccaatcggaatccaatcccaggcaccacgcctcgccgccgaggtaatacaccacttcggccttgtcggagtcgaccaccacatccacgttgccttcaaggtccaacgcgttcgaaagcacctcggccttgcctcttgtccgtggataatcggagtaatgtatggccgaggagggaaggcgtcccttgatcagctggtcgaagaaataattggcctctatggtctttccggcatggaccacctgcggcggcctgtcgcaccatacgccgcacagatgctcgaagttgcgcttctcccataggatgtcgatgacgaggccatcctcgcaggtgataagggaatgccggccgatcagcggcctgtacttcttggccgccgcgcgatacatgggaatgagtttctttttccgggagcggtcgagttccgaccccctatgcgacgcggcggtcatgaagcccctctccgaaagacgataaaaacccgggaacgtcaagaccggtaacgttcccgggttgtggaggactgttgtttcggtcttctgcatgactacccaaaagggtcggacacgaactcgaatcgatgccgccgcatcgatccgtatcacccgttcgcaggggctagactcccaattctcgcaacgcatgttccgcacggccggttcatggggaatccgcggacagccaatcctccgataagacttcggcttcaaccccgacctccggacgggaagaggagcatgggccaaggccttgattccaaactatacaatcgaaccatggaagtcaaataccccctaccatgacatgagatagggggcatccgtcacgcctcgggctccgcgtacgcgatcgcgaccggcaggcccatggcgtgcagccggtccgcggccagccgcgccgccgcgttctcgatccgccacatgcccgcatccccgtcctccggatgggccttcgcccactgggccgcgtcccgccagtacgccagcatgagcggcgccggctcgacgccgcgctcccgcgccacgcgggccgccgacgaggcgatctccaccaggccggccgccttcgcgtcggcccgccgccacaggccctccaccaggtcccatgcctcgcgcttcggcggatagaagtaccttgggctctcccagttgcggacggtgcgcgcgtccacgcccacgcgcttggcgacccactcctgcggcaatcccagcagctcccgcatcaggcggaagtccgccttcccgcgcatccgcgacaacgaaccgtccatgatccctccagaccttgatttcctactatgggaaacattgatacctgttttgggaatccctgtccagccggatccgggtcgccgccgaaaacggagctcgcccccgaagggctcgcggatccgccgccgcgccccgccatccggcgggagcacgtcgaaaaggggtcccgccatcgaaggcgggacccggcccggccggccggcacacagcatgaccggacgtccggcgcgtcgcaagcgtccgcgtgtctgccggccggtgccgccgccgaaggcggtcccggcaccgggccgaccggccacgcggcttgcgccgcgccgcggccatccggtcccgccgcgcaccgtccggaagacaagacgacataggagcgtgacaaatgaccggaaacaaccatgacatccaaagggacgaccgtcggtgcgggcactgcgaacgccagtcgggggagtgcgccgtacggtgccacgactgcgacggatggctatgcggggactgcgcggggacggaaaccgtcgaatgcgggtgcggcaacactgtatgcgacgactgcgcgcgcacatgcaacgaatgcggttcgcggatgtgcggggactgcgcatactactgcgagcactgcgagcacagcctgtgcgaggactgcggggaccggtgccgcatgtgcgacgaccgcctgtgctcggactgccaggaatactgcgagcagtgcgacgaacgctactgcccctactgctacgaacggcacgcctgcgcgaacacgcaggacccctgctaccgggacccgtacgagggacggcccgtccgcgagccgttcaccttcggactggaaatcgaagtggacggcaaccacgacaccgacatgctcaggaaccacaggctcatcgccggctggtgcccggacggcagcctccaccacgacggctccctcgaataccagagcgaacccatgaccatgagccaactcacggaaatccgccgactcgtcgaacgcatcgccaccgacaccgacaacacgctgtcgggcgggcacatgcacatcagccgcaccggccggcagaccccggcccgctggtactgggcgctggaagcgctcgacgagacccaatgcgaggcgctgaacatgcgccacatgaccgacacccgctggtgcgagctcatccacggcgactactgcggcaaggacaccgccatcaacgacacgcaccgccacaccatcgaattccgaacgttcggcccgtggcaccacgacaccgccggaagactcgacgccgccgtccattacatgcacgccatgtggcggttcttccagaagttccccgtccccaagctcaagacccgcgacatccgggccatgagccgcgtcgccgccacacaggccatcaacgacacgaacgccacgacggcgggaaggagacgaatctgatgtgcgtcatcgtcaccagccaggcggacaccatgccaagcctcacccagctcgcccggatgagcgacgccaaccccgacggggcgggcatcgcatggcacgacggccaacgcctccaccgctaccgcaacgaggacaacatgaagacgctcgcgttcatcatggaccactggcagagcctcgaaacctccccgttcctcctgcacttccgcctcgccacccacggcagggtgtgcaccgggaacacgcacccgttccgcttccgcaaaggcgaccgcaccggcttcatcgcccacaacggcatcgcccactcgtacacgcgcggccgacacgcgtccgacagccgcaacgcgatactcgcatggcaggccggacaggccgacctcgcggacggaagccaaggcaggttcgcgctcatcgaccaaaacggcaggctcgaatggctcaccgccgaccacgagaccatcccgggcggcaccggggccatcgaagtcagcaacaccaactgggacacggacggcctcatcggatacgacctgtgggaggaggcgtaccagcagggactcgaagccggatacgaaaccgccatcgaggagaccgccgacagcggatacgcgacgacgctcgactacacgccaccgcgccgctgacgagagtcgccgcccgcgccgggcgggcggcgacggcccccggcaggccaaagggctcaaaccgccctttggaaaccgggccggcccccggccgccggagcccacccaggcgccgcaccccgcgacgcggggcgacggcgaaaggaaacggaaccggcgggaccgcgcgatcgccgccgcccggacgcgcacggccccccacggggcccatgcccgcgcgcccggccgaccgcgccgcgcgcccgccggccatgccgccgcatggagcccgccaagggcgggcacggcaaaaacacagaggtttggccttcttcggcccatcgaagcatacccgcgtcggcgaacccgtcaacgccgccgcacacgccgccggacggcggggcgtcgcctcatgacggaaccgccttacgcggggtacgcatccgctgaccgaagaaggtcaaaaaacaaaagacgcaaaaaggagaaaacaccatgaccgccacaacccggaacatcatcgaggaactcaagcgggccgcaaccgaacagggggcgggcgaagccgtccgcaccatcgccggccccgcgctcgagacatggatgcgagccctcgacggcaaggatgcggacccggaacggctcgacgacctcgccacgctcatgacggcccgcctgtccatcagggacgccgcactcatcgccgccgtcgaacccaagctcgacacggcgaccgtcatcgacatggccgcccggccccactcgttcaacaacaagacgctgctgaccgaaacgctcaacgtcgggttcggcgacccccacatccgccccgacgagacccgcctcgcccgcgcggtgcgggaggcgtgcgcgatggccgaccgcgccaggaagcacggcgggcccgtcgcccaaccctacgccctcgccgcctacctcgcatggtgggacggcgacgggaaggccgccaccctcgccgccatcgccgcactggacgacgacccggaaaccagcctcgccatcatggtcgccgccatggccgcatccggccgataccccgcatacctgcgctgaccgacagaaaacagccgtggcgtccgacggcacacgccatcggacgccacgacggaaaggacacgacaccatgcacgcgaacaccatcgaaaccaccgccaatcaacagggctggacgctccacaccggattcgccggcgggcaatggctcgaaaccagcagccccgccggggaagacctcatcatagacgtgccttcgggccggcccatccccgaaacggtgcacgaacacgccgaacaattcgaccccgacgaacacgtgcgagccctcgtcaggagcccgatgaaaggacaacccggcaccatcgcggaactcctcgaagacgccaaagccatacaaaccatgctcgaccggctcgacgccgcgctgtccgccccgccggacgacgacccccactgggagcaatggacggccgaagcgctcgacgaaatgctcgacgacgtggcgcacaaggcctccagcctcgcccaaaccgtcctctggcaccaccacgccgccaaccacggcatcgaaacaccggagaacacccgccgccaatgcctcgacacgctcgacgacctgcgcgacctcatgaaccgggacgccagccgccaccccctcacatgacggagaaggaaaacgccgacggcaggcccgtcatccgaaagagtccccgcccgcatcaggcaggcggacggggacggcccccggcgggcaaaggggctcacaccgcccctttgcaaaccccggccggcccacgccgccggaccccacccagacgccgcgccccgccaggcgggacgacggcgaaacgggcgaagccctaccagacgaaggagccgcgccgccggcatgtccgctcccgggatgcaaggccccaaaaaggggccatcatcgcatcccgtccgcgtccacgccgcggacacggcacgattcccccgcacggaacccgccccaaggggcgggccggcccattccttttcttttcggccggtcggcttcgcctctggatcataccggcgtcgcggaacccgtcaacgcgccacgcaacgggctgcgcccggcgcgatcgctcaatgacggaacccgctttggccggtaacgctgcgcttgaccaaccggtcgaaaagaaaaaacaagggaccaccagacgggagcaagcaccatggcacgcaacatcatcaaaagcatcgaacgcggcggataccggtacgacgtcgaggagacgggcgacggcgcacgcccgtacgacgtgcaccagctccacaaggcccaaggccattgggtcgacgccggctacggacgctactgcgcatccatggccgaggtcgacgcctacatcggcgggcaaacggcgtgacatgccggccaaggaaggccggaaacaaactcaggacaaaccaaggagtcccacatggacctcatcagccaatacctcgcaagcccggaattcgccgaagccatcggcaacgtcgtcgtcatagcgatcatggccacggccgccggcatcgactggaagatatacggccgcaagaccaggcgacgcaccccgccgagcatcgacaccccgcaacgccgccgcagggcggcacaacgcaggaccatccccgccggccacatcgacgaataacagcagcgtcctcccgcccatgcgggaggacaggcaaacccctgcaaggaaaggaccaccatcatggacaccatcaagacgctcgtcatcgaacctttgcgccgtccggaactgcgcgacatcgaccccaccatcacggccatcgggaagacgatcggcggatacgccgaaccattgcccctcgaccggcggaccacgctctggtgcgacgaagagggggcgatcaggaacctcaagccgaaccgcaccatccgcctcagccaggacagccgcctcgcggacgccggcaagcccatcatcatccgcggcacgttcgtcatcacgggaccccacccgcaggacggccccctcggactcgacgacgagcagatcggacgctacgccgccatgttcgccgaccccgaagcgccctgcaggctccccgacggcaaaacgttcatgatacccgtccaccccatcgcctgacccacggccaaggagtccccgcccgcgccaaccaggcgatcggggacggcctccggcggccgggaagggccacgcgcccctcccggacctccccgcgccggcccgagccgccggccccgaccggcatcggtcttccgcacgcatgcgggaaacacgatggacgggcaagccctatcggaaaaaggaacgcccccaaaggggcgcggccccaggtttcccttttcggccttttcggctgaagccgaaacgatcataccggcgacgcggaacccgtcaaatcgccacgcaggcgggctgcgcccggcgcgatcgattggacggaacccgctttggccggtaacgctgcgcttgaccgaaaggccaaaaagaaaaaacaggggatagccggacaggcgatccacgacacaggaaaggacaccatcatgagccagtacaggataacggccaccatcaccagccagacacaggccaccgactccggcgcatggcagatgggcatcacctggaggaaaagcctcaccctcgaccccgccgaaacccaggaggccgccgacctcaggaaccaggcatgggaacaggccgcgaacggcatcgacgacgagaccacccgccgcatctggcagcaggtcgacaccgtcaccgcacgtgaagccgaacgcctgcgcgcccaggtcagaaaactcatcggcctgctcaacgccggccggcccgcgctcgacgagaacggctaccccatgtgggaccacctcatcgccctgtccaacaggcaatgctggcaatgggagatcgccgccgcccacagcggctgcctcgccgccatcatgcaggccgccggcatcgacgactggccgccagccgactccatgcccgacatcaccaaccccgtcatcaccatcaacctgtccaccaaccaatgagccaggcagaccgacgctatcgcgccggcaacaggtgacccacacggaagacggcacgggccgcctcccgaaaacagaacagccaagacccgcaaggaaaggaacaccatcatggcgaccatcaaccaggtcacgctgaccatcagcggaaacaccggcagcatcgaattccacacccgacaggacggcggcatatgggccacgttcgacgtcgcccagaccagccgcacccagaacccgcagaccggccaatgggaggacggcgccaccacatggatccgttgcaccgccagcggatacctggccgaacacctgcagcacagcatgctgccgaccggacccgacggcaagcagaaaggcgtgcccgtcatcgtcaccggcagctacgtgcaacgcgaatacacgaaccagcagggagcgaaacgaagcatcctcgaactgcgcgccaccgacctcgccgtcagcctgcgcgccggcaccatcgcctacaacaaggcgccgcgcgacaacgggttcgcgggacgcactccacagccgagccagcccatggcccagccgcagccccagcagccgacgacgcccgccagcgacccgtggaacgccacgggagcccaaaccaggcagcccgccttcaccgacgggttcgcgcccgcggcaccccagcagccggcgatctgacgacgaccacacacgaccaaggccggcccacacatacgccgggccggccctcacccggagaagaggccaacatgcggcgacatgccatggacgaatggatcgacaccggcgacgaggaaggagcggcgaaggcgttcgatgcgatggacgagcggatccgcccgcccatcggcgcgcagccgcgccagatcatccccagcaggacgaccctggacgcatgccagcgggccggctgccccatccaggccggcgccatccacgcatggcagtgcacatggagcgtccgcagcatcgacggcaccgtgatccgacgggacatgctcctgatcgacgtgaaacgcgaaaacgagatatggaaggcgacaagccgataccggctcgacggcatccgcacgggacggcaggcgcaggccgcgctcctgctcgccgccaccggggcgctgcggcccatccaggaacgattccaatagaaaccgataaagaacggaagccgtccatggaacgatggacggcttcctgcaatccgaatccggaaaagacctgtaagaccagcacctcttaaacggtccgaccggccacgatgcgacgggcgaacccgtgcaaccccgtcccgtcaaggcccgcgtattcctccgccgtcattccgcctccaaaaaaattatgatattatatggaaaacacataaggagaaggaggcttaccatggcattgatccaggtcaacgtccccgacgacgtcaaagcgcgtgccgacgccgccttcgcgcgcaacggcatcaccacgcccgccgccatgaagatgatggtcacccaggtcgccaacgagaaccgcacgccgttcgacggcgtcttctcctccccgtccgcacgcgaactcggcgaggacgtacgccgcgacatgctgctcgccgaggctcaggaatacgggctgatcgccgacgacgccaccgacgcgcgaaccatccccgacgacgtgctcggggaactaggcctcaccgcacaggaggtaggccagtgaactggagtgtcaaggcctcgccacacttctggcggaccgcgctgcccctcaaggagaaatacacccacgaacagttcgcgtccatcatccgatccataaggaaggcgatctgcgaactggcggccagggggcgcgtggaggagagcggatggcacgaccacccgctcgagcgcagcccgttcggggacggaaaccacttcgagttccacaccttcgacgacgacgtgctcgtggtctacttcagacgcgaggcgaaacgcaccatccgcatggtcggcatctacgaccatgacaccatacccgacgacgagtgatcggaaaaccgcagcgaaacaaacgggcggggccatccataagccggaggccccgtcttcacattccagacaggaacgggtgacgtccatcaaagacggccgaacgccgaatccatgttcgccagaaccccggcaacgaggcgacggatgccggccaaagccgtggacgtggaaacatacagccatctcgatccggacagttcgacacaggcgtcgacgtgcccgccatcctcgaagggccgacgaaaccggtacgagaagcgatcgacatcagccgtccccatcatccagcccttccgcatccatatgccgtcaacgacaacgccatccacgaaccgggatggagacggcatccatccaaccaagccgggacgatgacgtggcccgggtcccggcgtccatcttcgttttccctcccgatcggttccttggcgcaccatgccacggcgcacgccgggacgtcaacggtccacgcgacccctgcggggccccgcgcgtcccattgacgccccgacgcgcaccgcggcaaagagcggtcgtcaccaaccggaaaggaaaacgaagatgaacaccaagaccctcgacaacaccgcaaacgacccctgggcggacatcgcgaccgccgacctcgtcaactacgtacgcaacaccggacacttccccgccgacggataccagacaccaaagccccagaccggaatcgacccctgggcgccgaccaagtgaccggcatgggatggcggggccggacgggccctgtcctcccttgaccgaccagcaaaacgtgaatacaattatcatcacaataatagctatttttgaatcgattggagcaaggcgaatggcgggaaacatcacattggacaacctcgtgtccgtgtccgaactcagccacggaggggtcagcaagacgctcagcagggtgggggacaacaaccccatcgtggtcatgcgaaacaacaagccggccgccatcgtcatcagcccggacgattaccgccgactcaccgaggccgaagaggacttcgccctgtacctcgaagccgaggaacgaatgaagaaggacgacgggacaagactcggcatggacgacgtgttcggcaaggactacaagcccgtcgatgacggctatgttccggagttcgaatgatggtctggaacatcgaattcaccaaggaggcgcagaaggacatcaggaaactccgtgagccgtccaaaagccatgtcaacgaggccatcaacaaggtggcgcagaatccgcttcccctcacggaaggcggctacggcaaaccattggggcacaagcgcgacggcaacctcaccggatacctgaaggtcaaactccgaggggaggggctgagggtcgtctaccggctggaaagaacagtccattccatgacggtcgtcgtcgtttccgttcgtgacgacaacaccgtctacaaggaagcggcaagaagaataaaaaaggacctggcatagtggcacacgttaaagggggcggagtccgatgacggctccgccccctttgccgtcggccggacgggccgatcgggcacggagggcggcatcgaccgtggacccatccaatccaatccggcccggtccacgatcatgcccacgtcgtgcgggccatggccagcgtccgagaccgaggaccagggagccgaatgggccacgtcgatgcatgtgggccatcagcgtgccctgcgcgcttccggaccgcatcatgcgaatgggccaatgggccacatgccggaccgatcatgcggcccacgcgaaagcccatgtgagggccggcatcgcggaccaccctgacggaccgtggaccgtgcaagggatggtcccgcggaccaccctgacggaccacggtccattcggcggaccaaccaaatacgtggtccacgcgaaagcccatgcggggacggccacgcggaccacccctggtccatggaccgggccggacgatggcgtccccgtccaccgggccacggtccaaggaccatatgggccggtcggcgggcggacccggttcatgcggtccatggcccgagagcccatcgccatcgggccggtctccccaaacgcacatggagcaaagccatgcgcatcgcgcggcgcgcccggaaccggtgccgcatccccgacagtcgacgaacaggctcccgaccgtggacgtctccccgttcggcaggagccggcacccgccggggccgccatgcccggcctccctgcggcagccggccccgaacaaacaacggcacaacagacacatacgcgaaataaaacccgacatgaaaaccagcacccagacagacgaaaaagcacgacacagaaaccagaaacaacgaagacagaaccaagaacccacacagccagccacaaggtacgacgccatcagaaaacccaagaaaaagcacatcccgatgcaatctccgaaggagatggacttcttgcacccaccgcctcgcggcggccgcctatcggcggaactgcaacgtttttgatggtgtttgccgtccgggcgtccgatatcggggttcggcgttatcgacgggacgggagacgcgggccgggtgggggcgccatgaacgatgggaacatgatccaggagccgcccgcatgcccggtgtgcgggctcgcggtggaggagcgggacccgcgccgcgggaagccgctgtcgatccaccgggcatgccggaaccggcgccgggaggagctgaggaaggaacgggaacgcggacgccgcatgtcgcaggagtcgctcctgatggcatccaggaacgacgtcgccgaggcggccgccgaactgcgccggcgggtggcatggcgcaacgaggccgtcggcccagccgaccacgggacggtcgaactgtgctactggtcggtcagatgcatggcggcgctcatgcggctcgaaccggaaacgctcatggcatacgaggaccggtgggccgtggacctggcccggtccatcggatgcaagggcatggaccggatcgcgggcctgaccggctggaggggtccacgcccatggaccatggacccggccatgaccgacacgggcgaggcccacacgctcgagggcatgtggcccgaacccgggcccggggtggacgacgaatggcgcgccgacctggaccacgacgacggcgcgggcccgcgggccgtcggcatggaccggatcatcgagggcatatgggccgaggaccatcgagggcgcaacggcgcggaccacggatggtggtccctcgacgaaggggccaggccatgagcgaccgcccagggaccacaggggccacaagcgaatggcccagacccggccgatgcaaatgggcccggtgcccgcaccccgagaccctggtatgggcggacgggtactgctcggcccgatgccggcgccaggcgcgcaaggcggaaccgggacgggtgccggccggccactgccgcatgtgcggcgaacccgtgtacaagcccgcccagggacccgtgcccgacttctgctccgaccggtgccgcaacaggtggaaccggctcacccgcaccgggacaagtgcccgcccacggcgatcatgccacgaatgcggcgcacggctcgataccggcacgcgaggcgaatactgcggcgacgcatgccgcaaggcacatgactacaagacggcgcgcgatcggcgcacgctgcgctccgccgccaacgccggaaccatcgaaaggctcagaatgaacgccgacgacctgctgacgagggcgcacgccatcgaactggacaccgaaaccatacggcgacatggcatcgagacgcgcgcccgcacccacatcctgctcatgcgcatgctcacgctcgccgccacccacgacccccggtccctcacgcaggcgggacccgacggccagatcggccgcatcatcgacgcatgcgaccggaccggcgaggacggggacgcggaacgactcctgcgccgccacggaccggcccgcggcgccgcaggaaaaggagaggagcacgcatggccatcagcatgaccaaactcagcagcgccgactactacctcgaccgcacgcgcgaggcgctccaggccgacggcgccatacccgacgaggccacgcccggaccgctcacaggccccgacccagccgcctactacaacgccgaaggcaacccgcccggccggtggatcggatcggccagccggctgctcggcggcgagaccggacggcaggccggcgccgagaccgtgcgcatgctcatcaacgaacgccgaaaccccgaaaccggccgcagcctcgaccaggccggcatacgggccgacaacgacgggcagccgcccatcgccggatacgacctgacccagaccgtgcccaaaagcgtgagcatcctctgggcgttcgccgaccaagacacgcgccgcgccatcgacgaatgcctccaccaggcggccgacatgaccatcggctacttcgaagccgaatacgcggccacccgggccggggccggcggcgtcgccagcacggcctgcgacggggtcgccggcttcgccttcgaccactgggactccagggacggcgacccccacccgcacacgcacctggtcatctccaaccgggtgcgccgcaccacggacggccaatggaccgcgctcgacggccgcgccgtctacggggccaccgtcgaactgagcgaatacaacgccaacctcgtcaaggacctgctcacccaacgactcggctgggcctggcacgaaccggcccgcgcccgcggacgcggcaccagggccgtggccggcgaggtccagggagtgcccgaggagctcatcgacgcgttcagcggacgcgacagggagatcgaaacccggctcgccgccatcatcgacgaggaggaacgccgcaccggccatacgatcggatggaaacgacgcgccgaactccacaaacaggtctggctggaaacccgcaagcccaagaccgacgcccgacccggactggcagaactgacccgacgatggcacggcaaactgcgggccgaagcccccggcaccagcatcgacgccatgtggcaggcggtcgactcgcaccgggacaggatcatagaactgggacagaccgcctcccgggccgcgggcatccgcctcgccggacagctcgccgaccaccagacacccggccggacggaactcgaacggctcgccgacgctgccatggcacacaccgaacgcacccgcgccacatggacgctcagcaacatccgggccgaagccgaacgcctcctcgccgacatccggctcgaccccacggcccgcgccgacaccgccaaccaggtcgccgaactcgccatccgccgctgcgtgaaaataaccccgacccgctaccgtgcaggacaggccggcgacgaccccgcgctcgtcagccgcgccggacgcagcacgttcgacgaccccacactcgaccgatacaccagccagacgatcctcgacatggaaaaacgcgtcatggccacgttcggccgggccgaccctctcgcctggggacccggggagggcacccggctcatccagtccatgcgggccggcggaaaccggctgagcgacgaccaggcgaaggccgccgcatacctgctcgagaacccgcacgcggccagcgcgctcatcggccccgccggcaccggaaagacgaccaccatgcgcgccgtcgcccgagcatgggagacccggcacgggagaggatccgtgctcggcctgaccctgtccgtccgggccagggacgagctcgccgacagcatcggcaccaacgcgatcaccatcgccaagctcctcgacaacgtatccgaacggcaccgggcgcagaccgacgacctgcgacgcgaataccggtgccggctcgccgcggcgcgcacccccgccgaacgcgaccggatacgccgcgccatcagcgaatccgacgcccgggaacaggccggcctcatccaccccggacagctcgtcatcgtagacgaggcgggcatggtcggcaccccggaactggacgccatcgccgaactgtgcgaacgggccggagccaggctcgcgctgaccggcgaccccatgcagctcgacgcgcccgccgccccgggcggcctgctcgcctgggccgaacgggaacaccggtgcgcgaccctcaccagcctgtggcgtttccgcagcgaccccgggctctgggcgaacgaccccgacggcggacgggccagatgggcaggcgagggcgacgccacgctgcgcctgcgcgccggcggcgaccgcgcgaaaccggacagcgtcgaggcatgccgccggctcgtcgccgaatacgcggcccaccaccgtctccactggggcgaggaccgggaatgcgaggaggaggcgtaccggatgaccctgcaatggcagaagacgggcaagaccacgctcctcgtcgccggcaccaacgaacaggtgctcgccatgaaccagcgcaccatcctcgaacggcgcgtgctcggcctgtccgacggggacccgtcccgcctcgccacgctgtccgacggcctgaagataggagccggggaccggatcgtgtcccgcgccaacgaccaccaggtacgtggccccgacggacaccgcatcgagaacggcatggcgttcaccgtcacccgcatcgacacggacgcgatcgcatgccgcgacgcggacggaaggcaatggaccataccccgggactgggcgaaaacgaactgcgaggccggatacgcgaccaccatccacaaaagccagggcatgaccgtcgaccggtgcgccgccatgttcccctccgacgcgcgcgtcccatgcaacctgcaatacgtggccgccacacgagggcgcgaggagaaccacctcctctacgcgtgcaaggacgagaagacccggcagacggaagccatgctatccggatcggacaccgaccccgaagccatcgcccgccaacgcatgctctccacgctcctgacgcgccccgacacgcgcaccgccaccgaaacccgcatcgacgaacacgaggagagatacagcctgacacgactcctgcgcgaacacgactacgccgccggcctcatcgccggcccccacctcgaggccaaactccgccaatgccacaacccgggcatcgtgagcatgatcacgaggtccccgaactgggaatggctgcgcgcgctatggtcccgcgcctggatgaccgaccccaagcgggccatggccatcgtcagccgcgacatcagccccaaggacgagcacggcaaccggcaggaccccgccgccgtcatggccggccggctcagcagcggcctgctcgaccggctcaacggcgcggtgcgcgacgactggaccgccggcatcatcccgcccatcaaggcatccggaaacaccgccgccctcgacctggtgcgccagaacgaactcctcatcacccaacgggccgacgccctcgcccgacaggccgccacgggcgaacagccctggtcgaggaccgtcatggaaacggcgcggaaacacggcgaccacaacctgctgcgcgacgtggccatctaccgggacatgtggcacatcgacgaccccgaccggcccatcgggcaaaggccgccgggccggtccggccggcaggaacagcactggtgcaacctcgacgcacgcatcaccggacaaggaagcggcgtcgtcaaccccggcaaaacccggaaggccaaccgtaatcggacggaaaacccgacgccccgcgtggagacgccgaaccccgcagccatggaggaaaggaacccgcaatggaagacacggcaggaaccatcatcgaacaactcgcccgatgggccgacgcaatgacccggaccctggactcatgggacaccggcaccctgatcgtcctcgccgtcacgctcacggtgctcgccggcgtcaccggccgcgccaccaccggcggcggactcatcaggcagatcctgtggatcaccgtcaccgccatactcaccctcatcgccgtcgcgaccgtctggaccatcgcgagccgatacctgcccatccccgagctcgaaacgctcctgcgaaacctcgccggccaccagcccctcttccggagcctggacacggcggcacgcatactacgatggtgacgatggggaaacgggatacgatggagtgactgacaccggagcaaggagggaaacggacgtggaacgacggataatcatgtgtcgccgacatccggtgctggccttcgactacgatccttcatcgggaaaggccgtcggcagcggccgtatactggattgttcaaggttgcctctcgagctcatctcccacggcaaacccgcgatctacgcgaaaagcatcgatgcttggtggagaagaagggccatcccacccactcgggatgggatacgcggcatacttgactcgatgggaataagatcggcggtggaactcctcaaccgctcgcatggactcagcctttccgaccagtattgggtcaagcccgaatcatccgacctcgaatgggataccgtgaacttcttcaccaacccgtttgacgaggaacttggacgaaccctcctgactgcccgttcctcctcccacaggttcagcctcaacgcacccgacgcatccaccggcggcgaccttccgaaacgatggaccattgcgggcgacggcaccaggatactgatcaaagccggacgtaccggacaggaaccggtcaacgaactcatcgcatcggacctttgctccaggctcggcataccagcagtcagatataatctcggcgaatacgacaacaggccagtatccacctgtcccgaaatgctgacggacaccgaggaactcgtatccgcatggcagattctcgaatcggtgaagagggataatcgcctgagcgccagggaccagtggatcagggcggcgcaactgttcggctgcgaaggggcggcggtggtgcatgcgaccgacgattggctactcgtggactacctcatgcggaacatcgaccgccattacaataacttcggtctcatccgcgacgtggagacactgcgggtccggcccgcgccgttgttcgacaccggagcctctctgtggtgcggagagctcgccatagacaaccgcgactacaaggccaaaccgttctacgcgacttataagacgccgacagcccgccgacagctgcgcctcatatccgactggaccagatatgaccttggcaagctcgatgggtgggaggaacaggtgggacaccgcctgtcagtcacgggactcgtacctgaaacgcgaatcacggccatcgcgaccatgctttccgcccgtatccgcgaagtccgctcactggcggagtccgccggcgatgacagcacccacaaaacggtggtcatgggtgccgaaacgggaatagggaccggcatgcttccgtggccatcacccatggaacaggtggaaacggggaatctccactggcagtccacgacaagcggcccgacatcgttctagaacaacgggtccatgccctcgccggggatattgcggcgtttcgaggcgcggcgggcaatcaccacccacctgccatcacggttctgcgcctgggcgtcccacaacccgtcctcgaagccgcgacgctccccatgccgaatcttccaggccgcggcccacgccgcacgccgattcaccgactccgccaccacatgccagcccggatgggctttcagccatgacgccagaccgggcccattgcgcttcaccgtgccgatcggccgcgcgtcctcgaccacggcgtccagtccctcgccgcggcaacgctcgagaaacccttccgcagccgtcgcatcatcgaacatgacccttatcaccgtcttcgccataggcaggcattttacagaaccgcacgcgaccgaagccggagagggctccatggagaaggagattcggtctggaactgacgatgagacgaaaacgagtggccgtgtccgtctcggatgggtttcccgggagccggcagtctgcctgagtgtgggccggacctagactcgaaaaactgatcagggaaaaaggaaacgggagagtcgggggaatcctgagcccgagcgcggcgtttgaaatccattggacaataactgacggcatgccgttgacatggggtgattctccggtatgaggctgatggtggtaaggcgcaatgagattcaccggggcggcgtcaaggtctggaatgatgcatgattcgatatgctgtcgtgtccatctccaacgggaacagacggaacaatggacggttttcttgagtctgttggatcgcggattgcagatgctgccggatgggcgcgctcgacgacctcatcgggagcattcgggcggaacgcgcggcgaggtggaactgatcaacgagggtgatgatggacaccaatgtgatgctgtccgccagcacattccgttccgccaacgcggtaaggacgattgagttggcgtcgggacgtgaccatggactcggccggcgtgaggataggcagcccttccatcatcacgccgaccgagttcgtgagcgtgttcttatgacgttcccgcgccggctcgaagcagagtggcggtctcagccgtgagtccggccggcacgcagcatgcgggcctcatcggtgtcgcggatgcgcaggtcggtgacggtgaacgcgaggatggggccgcccttctcgggccggtagagacgtggcctgccggcgaactcgacgatctggccgccggcggccccgagcatgcggttgtggaccgccccggtggcggggatcagggcgacggggatgtcggcgccgccctcccgggtcacgcagcgcagcatgcgcacgcgtgtgccgtcgggcaatgtgatgcctcggatgccggccggcaggatcttcgctatgccggggcaggagccgatgccgagacggatgccggaaccgctgtgctcccgccgcgtggtgtccgctgtcattgtgcttcctttccggtgtcgggtatggtgaccgatggtccgtcctgagggaacaggcggtcgatctggtcgacggtcatgttggcggtgcatgcgctgatcgatttggtgagggtctgctgcgcggaggtgagcttgtcgtagtcgtcggatccggcgtcgaccaacgttcgcgcctgtttcgcggccttggccagacccgtgcagtcgtccggcgtggggccgggaagcctgtccacggcatgttccgctttgggcagactggatttgagatcgtcgagccggtatccggcggccttcggcaacgcctcggcataccattcgtcggccaatgcacggacagtggattccttctcctgccggccgatcgcgtcgaacaggtcggtcgcgttgcccaggtccttgtcgccgtggcggatgagcgtctggccgaacgtgtcgatgttgccgccgtccggggagttgaggatcgaccggaccttgttggcgatgtcctccgtggaaccggtgaatcccgatggttccgaagacgggtccgtccgggactggtttttcgtatccttgacgccgtccgtcgcctgttgggcggattgaggttctggttgatcggatgtcgtggactggaacgggttgagcgcgatcgtggccgccaatgcgatcgcggccgcgacggcgagcagcagcgcctgccgtttcggctccatccgctcgaaccggtctctcgctcggccgagaaggccctgacgttccctgtgctcgcctttgcgtggtgtctcgtccgtcatgatggtgctcctttcgaatggatgatgggctatagtcccggatcgttgccgggcaggccgttgccgtcgctgggggacggcacgctccagccgttgccgggctgggagccggttccgcccgattgccccgactgtcccgactgtcccgactggtattggggtatccattgctgttgctgctgtggcggcgtcgggtcggggacggtctgctgttcggactgccgttccctctcctggcgttcccgtgccgctttctcctcggccgcgcgcttggccttcgcatgctccgcctgcgtggcgatggcctgttcgagggtcttcctcgcctgctcgacccgggagaccagatcctcgagctccttgacggtgacgtccttgccgggctcggcggcccgttcgaggatcgtcgtcagatcgtcgatggccgtgccggtgtcgtcgtcgcgcttcgcgccgtcccggagcttggtggcctcgccgaccgccttcgcgagcgattcgcgcgcgtcggcctcctgtttgatggcgagggccctcctcgccgccgacaccagcgtgttcgtgtccttattggccttgcccgcgcggtccttcaacgatccagcatccctgatggacagccgggcggcgggctcgtcgagtatcctcgcgttgtccgaaatccgcgcgtccagacggctccatgccttcgcgtcggcgaggtcggacgccttgtgggctttggcgaaccgagtcgcaatcgtattggtctcccgcagcacggcctgcgcctgttccgcgccgtggcgggcggacgcggtgacggcgccggcggcgatcacgccgacgagcgccacggcggcgaccacggcgagcaccgtcagtacgatccggccggcatggaccgaacgggcgggctcatcggcatccatatcggtgccgaatcccgggatcgcgtcctggtgcatgtcatccaggtcatcggatggcgacgtgtcgtcggatgccggcagggggatcgcatgcgcgccggaaggcgggggagccgtcacatcgccaccggcccccggtcctgaggcctgcggcgggacaatcctttcctcctcttggggaagatcgggctcatggccggtatcggtgccgtcgtcgccggcggccggcgtgggggagagagtctcgtccggttccgagagcaggcggcggatccaatcatcgccgttctcggcaggggagtcgagttgttcgaacaggtccggcatggtcatgggcgcatgcctcccctcgggccgatcgtcgcgcgtatcgtggccgtgagccggtcgagctgttccagggaatcgagatcccgttcacgggcgatgccttcgagccgtttcgcgagcttcagctcctcgtccgggtcccggggccggtacgagtcggggttccaacgcgggtccccggcctcgtcgagcagggcgcgtccccgtgacgccagtgcgcgcgcctcctcggcctcctcatgggacaggggtgccttccggtcgtcgagccgtcgttcgatggaggcgatggcctggtcgagccggtcgcgggccgcgagctccatggacctccagtcacgccaccggtcggacagttcccgcagatcaccgccggtgtccgcggcgagctggcgtgacaggcggtcgcgttccggcccgtcgggcatgcggcggatgccgtcgcgggaacgccggtagccgtccagccgctcctcgcagcccgccagcgtggccatgagcacgtcggcggagggatcgtcatgcgaggcgggcgagggaggcgtcccgtaggcaaggagcgtggaggagacgaaatcctcgccgccccgccaacggccggtgaacgccggttccgtcttccatccgccgcgccggcgataccacgactcgtattcgacctcccgggcgcgtcggcgcgaggcatgctgttcgccgtccatgtgatgcgcgtgggaggattctcccgtgccggccgccgtcaggtattccttgacccgggcgagggcctggtggatgtcctgcatgagggccggcatgtacatgccgccgttgggggaggccgcggccaggtccgcatggcatttcagggcgaacacctcagccaccacgtcgtcgtgctcgatccagcaggcgggcagcgtctgctcccatgtggggaacgtgcggcacagccattcgccgtagcggatcgcgtgcatcgtcatcaggtcgatctccgtgcgcgagggcgcgccggtccagtcgatcggccgggccatgcccatcgtctcccaggagcgttgcggcatcgccgtccacaggcccggcccgtattccggctcttgcggaggctcgccggtcaggttgcgcacggtctgctcgatctgcgcggccaggctggccgacgggtccttgccctgatgcgccctgtacacgtccgacaggagcacggtcagccgcgcggccgacgccgacgcggcgtcgagcccccgggcccagtccgcggccggcggcacgggggatgagacgccgccggccgtaccggtccggcctcccgtcatgccggccaggatctcgtccacctcgtcacgggtgtcgtccatcacctgtctccttccgcgtcatgccaccatccgcgttccatgaaatgcggggcgcggaccagggccggcgcctcgcgcacgggctggacgaccatccacccgcgcggcagacggctcagctcccacggcagcaccgtctcctccgcgccgcggcgttccgtgacccctccaagcgggccctgtcccggattccacgtggactcgaaacgggtgacctcatgccggccgatctgcatgccccaccattcgaggctgtcccggtcggtcacgccgcccagcatgatccggttgcagttgttccaaacggtctgctcggtctcccggtcgtagtcgcgcaccatcatgtcgcgcgactgctcgaccacgagcaactgatagccgttgccgccgccctgcgtgatcgcgttgcgcaggccgccccacgtctcgatgttgctcagctcgtcgagcacgaaccgggccggcggctcgatcttgcgcaggttgggtcccgacgcctcgcgcgacagggcgagatcctggcacgcctcctggaacgtgtccagcaggagcacggcgaacaggcccgcgttcacgcctccgcccgcctgcgatttcggccggctgagcacgtacacggtgtcatgatcctcgaccatgcgcctcggatcgatcagacgcgggtcgcgcggcgagaaatccatcgtcgaacgcaccttcgggtccgcgaggatcgcgaacgcgttcctcacgccgaaccattcgctcgaccgttggcgcgtgtccatggtctccaggccacggatcgtgtccgcccagcgcagcatctcccgctcgcccgtatgctcgcggatcaggtccgcggcctcgagcgccttgcgggggctgaccgaccactcgtagcatttcgagatcggcaggttgctgatcgccgccgcatacagaagcgcctggatatagcctcccgcgctcacgccccactccctgttgttcgacccctggcccaatccgcccacacccaccagggtctgcgcgcggcgcatcgccgtggtcgggtcctcgcacccctgcaacggggtccaacgcatgttgtgccgggtcagcggatccgccgcgcccaacccctccgggtcgaagatatggacacggccacggccgccgtaccgggccccgttcgacggatccgccacacccctctcccgcaggcgacgggtcgccgagatgatgtcgctgcgcgtcgacgtggccagcacgaagccgggcgcctccaccaccgcggggatcacgaccgtcactgtcttgccggacctggtcggtcccagcacgtacgcgtgcatctccaacgacagccagacaccgacgtgatggcattcgcccacgtacatggccgcctgccagggcctcggccacaccgggtcgccgcccatgcgacgctcccgcatggccgcggccagcatggccggcagcacgctcggcaccatcgtgcgcatcacctcgcgcaccccgcacgcggccgcgacctgacgacgcgtggccatgcccggagccgacgacagacgatccacgagccgctccccggaatcacggtacgcgtcccagaacgcccagagcacggcgcacgcggccaacgcggccatccagaagggcatggacagcagcccgccggccaccggatcgccgcccgccgccgcgaacagcagcagcgtgaacgccatcgccacgagcaggacgcccgcggccagacgacgcaccagcaccgacccctcacgcgacagggcggccagaagccccgtatgctccgccagccacacgcccgcacgcgagtcctcgaacccacgccacacggccatgacccgacggcgcgaatcgacacgcgacccctccacgccccggccggcatcgccctccagatcgggcgccagctcctcataccagggacgatccccggacacatccgccatcagcggcctcctcaccaacgaatacggaaaacggatacaacaaaaacgatgcggttcaggccgcggacctcagatcgctcgtgtcgaacagggccgacagggtcggaccggccagggcgcgcaccatacgcggatgctccgcgccgaccctccacacccccagcccctgcggcagcgtgggaatcacccgccgctcgtcctcgctcagatccgggaccagccggctgagcatgtcgatgttcgacccgccctgacggaagatgatcttcgtctgcatctggttgaggatctcctcgacacggccacgcagctcgctgccctcgccgaacacatgcgtcatgtcgttcacgccatgcacgatcagccaggtcgcgcacccccaatggccggcggaccgctgcctggtctgcaacgagtccaccagacgcgcgttcgacagcagatcccacgcctcctcgtcgaccacgatccgccgcctcccgtcacgcccctgcagcagacggtcgatccacgagctcaccgccgccgtgaacacgcgcttgagctgctcgttgttcaacgccggactcgacgtgtcgaacacgatcatcgggctcgacgggtccaaccggatcgtggactccctgtcgaacatgcccgacagggtgccgccacgcaccatcggcgcatacacgcgagccgccgcggccgccgccgcacgcgccaacgccggctcatgctcgaaacccgtcatcgacggcgactccccatccacccacgaacggtccgcgagacggtccaccgcagcctccaacgtcatcggccccgtgccgaacgacaccgccacacggtccacgaccacctgcatgtcacgatccagcgggaacgggcctccatcctcgcgcaatgcctccgccaggctcatgaacgccgccttgcgcccggaaagcacctcctgacgccacaaatcgtcctcgccggcggacggacggtccggcaacgcgaacgggttcagataatggccgccgcccggcgagacgacctggcctcccacatgattggcgacccggccccactcgccctcgcgatccgactggacgatcacatgacggcccgcctcgatctcgcgcaacgccatcaccttcgccgcgaacgacttgccgttgccgcgaagaccgcagatgaacacgtccgggctggtcgtcatatgcgggccgtgaacgcccggcgcgtcatacgtcgcccacgaatcgaaccgccacaactcacgcgacagcacatccacgccgatgaccggcccgtcgatgcgaggcgcccccgaccccgccaccagcgtggacaggacccccgcacgccccgtgctggtctgatgccacgccgtgaccggccgcacgcggaaatcacgggtcatcatgtccacgggggagggcgaaccgaggggcagacgcccctcctcgtccgcgtccaccatgcgccgacgccgtttcgcatccgcggccatcgcgcgcatcagacccggggccacgcccatcgcgtcctccaccgcatgccggtcggcgcgacggaacgcatgcgcgggcatcggcccgggcttcacacccgccgtcagacagcactgcatccacatcgcctcgcgcagcgtcaaccccgtcgccaccggcaccagacccagacagaacacgccgcgacgcatgccctcgcccaaccggtgttctccctccaacaccggagcatccccagtcgaaccagacatcacaccaacctccgacgatcaggcccacacacaagacgaaagcccgccggacacgccgacgggccggaagcgaaacgacgatggacggtcacaccgagccgcccatgccgcccaccagcacgccgaccaacaccatcgcggccacgcacaacacgcacagcagcacattgccccagaacgcgcgacgacgctggcgacggctcatcgccaccacctcgtcacggaaacggctccccacataccgggacgacggacgggcccgcagcatccagaacgcgcgatacgcgaacgacgccgcggccaccaccagcagcaacaccagaaccgacagcatgacacactctcccaatcagcccgccgacaccggaaccggaaaacggaagacgcgacggacgggcaagcggccacgcctccacggacaccaccagcccgaccgccgataacggccggcggccacggtggcagccacgaggactcgggcatgaacaggaacgtgcccgggccgggaaacccggttatcgtcgtaaccggaacagggaaacggtccgggaaccggatccgggaaaaccggcatgggaacgacgaacggaaggagcaagggcatggagcaggaacatggcgccgatgccgcggcgatatgcaagggagtgctgctgcgcgtcgggatggccgccgccatgtcgacggccgtgctgggattcctctcctaccacgtgctgccgcgcctgaggaaaacggactacctgagaatggtctccgacgcggacgcgcaaaccgcgctgaccctggcaccgctcgtcctgctggccatctgctgcctgtgtgtgtacccgctgatcggacacgggaaaagaagccgcgcggacgtggtggccgtggcctgcaccgtcgcctcgttcgtccttctgggagcgggcttggtgaatatggcggtcgagaaaacggtgaccccgctgctcgcggtctccgtgttcctgttctgcctcatgctcgcccacacgacaatcgccggcatgaaggcgacgctcgaatgggtcggccacggcgacaaggcggaccccgcacgactcacgttcatctggggcgtgatcgtcttcgcggcgggactgatcgttcactagaatcaggaacgtgatcagacaaatccccgtaggagagaaagccaccatacttgcatccctggtctacatcatcgcgctggcattctacaagcactggctgcattcccagtacgatgtcatgaacggatctctgatcgaacgggccttcgccaccgccggaaaaccctggtactggtttttcctgctgaccggattcgcgttcataatcctgctggtctgcatgggagtccatctgttcagaaaagacatggacaagccgggaaacctcgtcggcgtgatactgaacatcgtgctgatcgtcatcctcgtgaccgtcttctgggaccccatcttcaccacgttcgtcgtgctcgcgttcgtggccggcacaagcgccgccgcgatgtcctaataaattcaacaaaacacgtgaaaacggatcatcacggatatacggtggttgagacggctgatggaaggaagggaagccgatcatgaattcatatacgtcgaatccggatgaagccgaaaacagcacaggcaagagcatgaagaagaatattccgggattggcattgctgctgctggacctggccgtggctctggtgggtttctacataggaacgcattttttctggaaagatcagaatgaagaaagcgtcatagtcgctggagccatgtcggcagcatgggcgaccttttcatgggcggtattcggtcccatgctcggccgtgataggtcaacgaaattcgaaaagggcatctttctcatgtccatgctggcgtcctgggatgcgggggtggcaatggcctgcgtcaactacggcggaaagggaatggccttttcaggggcgggaacgtcgctgtggctgctttccgtgggcttcgtctactgctggtatgtggcctgtgccatcatcgtaagagatgtcatgccgtcaaagtttcgtctgaagattgtcccaatacccttgttgatcgggatggggctatccggtctcctttactacgtagaagggcctatccatacatttatcaggctgatgtgcgtggtcatgttctggctgttcgcgttgtccctcgcatattgctggcccgatggaaaaatcggttccggtcttgccgactccgcatccctgctggaatggcggtacgtgatttcctcgaccttgtttctgaagaacgaaataaccgaatcgatcacattcgacaacatcaaggactgggatccccgcgtcaaacgatatcttcccgaattcatcaggaaaaacgacaccaaagccaaagcaacgaatgcggtgcttgatttaggaggaatcgtccccactgctgtggccgtatttgggttcggcccattgaaagatatgaagggtgtaaatggcgtcgtgttatggctatgcacgtttgtgctgtcattggtggcgggactgttcgcagcctggcgaaagcgctattggaaccggctcaggaactgccagcgaatcctgtcagagaaagccgagtcgaccgaaaacgtcgataaggtggtacaggccgttccgtcccatgtcattcagtagtggtccttcgcggagaggatgcagagcctgtcgtcggcgacggtatagatgatacggttggctgagtcgatgcgccgcgaccatgcgccggacaggccccatttgaggggttcgggcttgccgatgccctcgaacggggtacgctgcatatcccggatgagcgtgttgacgcgcttgagggtcctgcggtcctgagcctgccagtacaggtagtcggcccaggcgtcatcggtccagcagagcagcatcacgcgcccgcttcgacaaggtcatgggccatcgtctggccctgccgtacctgcgccatgccgcgcatcaccttatcgctcagatacgggttctggtagacgcgcagcgtctccatgagcgaatcgtagtcgtcggcgctcatcacgaccacgttgtcctccgggtccgcgttggtcacgagaagggtgtcggcgtcctcgttgaccctgcgcatataggtcttgagattcgccctgaaattgctgtaggccacggcctgtgtcatcacgcacctcctgtttgtacaataaattgtaccatgacatcgtcggaatacgggccggagtcgcggcgcgccccgcgtcggtcgtagcgttcccgccgggcgtcaaacgggtgcatgtccccgccttaatagaacatttgttcgaatgctggttcggttcttgttttcgggaaggcggtaggtcatggcttggagattcgtcacgcacgcatgcgggcaccaggagcggatcaacgtggacggcccgtacgtggtcgtcgaacagcgggtgaggaacgcggaacgggtgtcatgccccgcctgcatcggcatcgcgtcccggcagcgcaacaggcttgacgggttctgcgaactgtggggctcgaaatcccagtgcgaccgggcggagccgatacgacgccgcaccctcagccaggtcgacgtgctcgcccgccacgcgcgcatcgaggaccgtgacgcgttcgccgaactgcgcaggcaggtgctgcggatgaacgacgcggcatggtggatcgaacacaaaaacgacgcggccaccacgctcgcccaggacatcgagctctaggattgcggaagaggagacggtcatgtacgaggagcatgaggacgggtcgttcacgctgcacatgtgcgaatggtacgagcaaggcaggaggctcgtgggcgaatacgagacgctgggcgacggatccgggttcgccgtcaccgacgagtggccggccggtctcaaggtcgtcgtcaaccatccgttgacacgtccggacggcaccgtcatgcccggcatcagccggctgcgacgcttcgactggaaggtcgggcccgacgaggggctgcacgccgacgactacgagatctgggagcgggaactgcgcgaacaagccgaacgcgaccggttcgacggcgagctgcgatccctgggagcgttgggcgacggggaatccatcttcggccgacagccgggcaacgggccgtcgtctccggatggcgatgatggcgtgtctgattcatgaacggacgaaaggaagtagcatgatgacgggatatgccgggcatccggcatgattgggggatcaatggatgggcaggggctgcgcatgtgcagattcacacgcgacgggatccccgaactgggcgaatacctggaatcggtggacggcatcatgcgaaaggaagacggaccgatccgccacaaggagaatggtgccgtccgtctccggtgcccgtgccgggagtcgaacccggtgccactgggaaattgtgagaggcgtggcgtgccgtgcacgggccggggcgcgcccggaggaccggacgcgccgttgttcagttattcatcactgggcatcgccggatgcgtgttccgctccggccgtcaccgccttcctgcggcggcgtgccacggcgatggccacgccgttccagtcgtcggtggcggactccaccttggtgtccgagcagtagtccttgccgtcgatggtgacgacgtcatcggacttgctctcggtcttggcctcgggcttggagccggactcgtcgtccgaggtgccgtcgccgaatggggccgacgtgtcgaccggacattcggtcaacggggtttgcctgtcagccatgtgcaacctccagaggaatgatgatggtgcgaacaatgtcagagtcgatgatgcggcgggtcgcgggccgctgcggggcgcaccgtctacaggccccatcgggagcacggctccacggatccacgggtccacgggtccacgggtccacgggcatgggaaaggccctccgccgggagaggctggcgaagggcctttcccatgcccggaacccgtcgtcgtaacgtctccttcgatcctcacgcatacgaaagaaccgcacctccgatcatcgaatctgaatttcttcagtccaacaatcggggtgcggttcagcttcggccgagagggaggacgtcaccttgcagccggtgcaaaagaaaaggccgggcggggaatcagctcccctgcccggcctttctactggcctaccgtggctttacttcctgtgccgcgcggtctcggtttggtttccgcgacggcggaacagcatcaatcccactcccaagagcgtgaacgcggccaacgccacggtgggcgcggatacgccggtcttggcgagttggcgaatcgtcttcacgatggccggggtcgccggtggaatgtaggagttggtgaactcgggtcgggttccggtgacggtgaccatgccgggggtcgtggacggcttgtccccgacggcatcccccttgatcctgtcggccttgtcggtcggcgtggcgctggaatccttcgtcttcccgtccgtcgggtcgtattcgactttggcggtcagattgccttgcaggtcgtcgcccacggtgacggtcacgtgatgttccgtcctgtcgtaggtgacgttcttctcgccggtgttcctttcccgaatcacgtaccggtgttcgccgcaatcgtcgatgccgttgttgtcacgaccgtaggtgagaggcttgaaccggatgtcgccgtccttgtcgttccgttcggtgtcgatgaccttgccgtccctgtccacgagttcgaactcgaactcgtggaccttcagcccgcgtccggtcagacgcttgcgtgcagtgagttccacgagcacgttctgcggctggtacgtgttagtgaagcggatgccgtcctcggaaccgttttcggtggagtattcggtcttcgcggtcaacgtgtgactgtccgcatcctcggtcggtgacggtgacggtgtggacggtcctgtcgtaggtgacgccacccagatcgccgtcctgttcggtcacggtgtacgtgtacacgccggcccggtcgaacgtgagcttgtcgaattcgagggttccttccccttcgcggacgtccgtcgccttgtcggattgcgcgtcgcgtggaacgcgggcgaaccgtttggtctggaggaggttgccgtcggaatccttcaattcggcggcgaactcgccatcgttcaaatcacgtccggtcagacgcttgtccgccttcacggtcacgtcaacgggtgtcggcgtgtacgtgttgtcgaatcggacgtccgtggcctgacggtcggcggaggccgagagcatgccgccttggtcggtgacggtgacggtcacgtcgtattcctgagtggagtatccgatggtcttgtccgttccggcgagctccttcacgtggtacgtgtacgcgccgggcttggtgtacgtcatccgtccgaacgtgaacccggttcccttgttggcgacggtcagtttgccgtcgcggcttccgtcgggcatcgggatgtcgccggcgtcgatgggattgtcgtccgaatcatgcgcggacgccgcgttcagttggaacgtgaactcgccgtcctgcgggatgcgaccggtcgccgtgtccgtgttgacgatgcgtttcgcgccgccgatggcgtatccgacgttcttcggattgtaccggttggtgaacgtgacggtcccgtcggaatcgccggtggatggggtcacggtcttggacgtgacgctcagcctgcccgtgtgtccgacgtcctcgaccacgtaggtgatggtcgccacggtcccgtccttggtgacgcccggaacggtcgtatcctgttccgacatggtgaacacgtaggtgccgacgagcgggaacgacaatcggtcgaaccggatgtcgccgttccggtcgttccgtttcgtctggtcggggttcgacacgttggcgggcgcggactgctggtggagggtgaaggcgaagtcgtcgcccttgagcgggtacttgttgccttcggacgcgctcatcctcttgacggcggtcggcgtgtccgtggcgggttgcgcccggtacgtgttcgtgaattcggggatggcggtcccgccgtcgtatttcacgtcggcgagcagctgtccctccccatcgtcggtgacggtgaccctcacgtggtgtttcgcggcatcatacgtgacgccgcccctgtcgccgggggtttcccggatggtgtagtcgtacgttcccggccgcgtgtaggagatggcgtcgaacaggacgtcgccccgctggtcgttggtcttcgccgtgccgacctgaccgcctgtcttgtcctcgacgcatgtgaactcgtattgtccggcttgcagttggatgcctgtatggtcggggtccgcgagcgtcttgcgggcgcggaattgcacgctgaccggcttcgcctgatacgtgttcgtaaactggacggcgtcggattgcacgccgtcgcacgtcgtgttggcggtgatatgacgtttgaacgtggtcaaatcatcggcgacggtgacggtcagaatccaagtgcggtcgtcgtaggcgacgcccgggttgtctcccttgcgttcccggacctgataccggtagacgccttccttggcgaaagcgttggagttgatctggagcgtctgcgtcctgttgtcggcgaacgtgatggtggagggcaccgcgctggcgggcgcgccgtccaacgcggtgatgtccgcgacgtacctgtccctgtcggtccaagcgccgttcggacgcccgtccaatactttgaccgctttgaacgtggcgggcgtggcgagcatgagcgtgccgctcatgccgtggtcctcgttcgggtcctcgtacacggcggacatcatctcgtccaacgcggggaacggtttcagcgtgatgacgccggcgaccatgtcgccgtgcgaatcgttctcccggtcgctgtcggagtcggtcgcctcggacgcttccttcgcgtttttgacggtgacgttctgcccgtgccaggcggtgccggttttcggcgtgaacctgagcttgaacccggagcctgccggaatggaaccgatttcgtagtggccgttcctgtcggttgtggcggtgcagggtttgccgtccacactggtgactgtcctgccgttcgcgtccaccagcgtgacgttcacgtcggggaggagacggtcggtgtcctcgcgtacgccgtcatgattggtgtcgaaccatgcgacgccgttgaccttgcgttccacgacctgcgtgaccgcgtccaccttgttgtcgccgtccgcccaccggttcacgtacatgtcagacgcgctgttgcctgtaggcttgatgctcaggctgaaatcgtagcgggcgttggcaggcaggcttggcgaggtgaacgcccacgccaccggcttgctgtagccgtcggggatggtcaccttgcctgtggtcgcattcaccgtggcttcggtccattgttggacctgttcgcgggttatcttcgtcgcgtccacgttgcgccacttctggtcggtggtgaagtagactttgacgccgttcatgctcgcacccgcacccgccttgacggtgagtccggtcagagcgtagtcgccgtgatagttggactggttcaagcccctgtaaggcatgacgtccaccgcgtacgggtcggttttctcgtccttggagaagttacccagcatgttcctgtatcccaatgggcggttgatgtcgttcagcagcgggtcggcgcgggtcgccaacgcggacgcgcgcgtgcggctgacgcgtatcgtcgcgtcggctatctgcgcctttggagccaatgggggagccatgttgcgtttcgactggatggtcgcatggttcgtgaacgaatcgttgttcctcacgtcatggtcggggtcggacgcgtccccgatggtggtggaatagtggatgacggtctgcgtgccggagtcggcgcgcgccccgttcaccctgatggtcatggtggtggcgccgtccttgttcacaacgatcgtcggcgtgacgggcgtgccgccggtgaccgtgcctttgtcgggcgtatgctgcgagtattggccgccgaccgtcatggaaccgtccacgtaggtcaggcctttgggcagcgtgtcggtgatgatgtagtcggtcgtgtattgtccgccgtccgtggtcgtggacgtgtcggcggtggcggtgagcttccagtccaccgcacgctgctccttgtccaaatcgtagacggttttagcgttgccggcctcgttggtctgctcgacctgtttggcgatgtgcggtgtttcgccggccacgtacaggctgtcgcctttcaggaagtcggcggtgtcgccgccctgatagacgccgttttcgtcgaacgtggcgggacggtacgtgtcgccgctgtaggtcaggtcgggtttcacgctgttcgcgtattcgggcagtcgggtggcgagactgtcggaccattgctgccattgcgtgtccggcgcgtccgcgtccaggttcgcggtccgggcgaggctgttgcgcgtccagtaggcggtttctgcgacgatgggcgtgaccgtgccgattctcgcggtgtcgaggatgcgggcgggcagggagacgatgggcgtgaatgttcggttgaagctcgtgccggtcgggtccaccgtgttgtggtcttcgaacagcatgccgactatcttgccatgccgtttcgcctcgttgagggtcggatagtagtcgaggccgctgattttcgtgtcgcgctgctccctgtagtccttccagttggtgccgtcctttttgacggcgtaccagtaggggattgcgttcctccgtttggctgccctcatgccccacgtgaagacgttcatggggatggtcggctgcgtgtcgggatggtcgtccaccggttcgatgctgttcgggtcgagtttgaccaaacccatgcccatcacttcggcgtcgccttcggactggatgatgatgttgtggcctatttggaggcgtagtttcgacccctgtatgagactgtctgacccgttgccgtagtcgggttgcgtccagtcgcagctcgtgcccgcatcgttccatgagcctcgcgttgttccagcacgtgtatcggatgcgcgtactgtacgtgcccggcatgcggacggtcatggccgaacccgcatggtcgtcaccggtggaggcctgattcgaattgtcttccgccgtggcgagacggtctccgctgacgccggtggccgtcaatcccatgtcgtccatggtgatgttggccgtctggtccacgttcccgtaatattgcgccacggtccggccgtcacggctggtgggtgtgatgaactgcaacacgtccgtgtggatggctccgacctgcatggtggagcagtccgacgtcatgtaatccgtgctgcatttattgtgtgtgccgttcagtttattgtggatggggaggacggacgtgtcgtacccgtcgaacgagacggtcacgtccgtgccctgcccgccggtcgtggtcgtgaccgtcgtgttgccacgcgccacacggtcgttcccgtcggcacggtcggcgacgcccggagcctgataccgtaggtcgcccatccatgcgaacgtccgaccatacttcgaatccatgttgtcgatatgcccgtaatcgtagagcaacggctgccaacggcgttccatcggatgcttcgtcccggtcttcgtatcatccgaatactggttggacaggtgaatcttataggtgatcctgccggacggagcctccaaccccttcaaccccttcgtccggtcgggccaacgcatctccgtgaccaatgcgatgcccaaacccaagccggtcaccttgccctccgtcctgttgggcgcgttcgccgcacccgaggagaagtcgaacacgcccctgtccacgttgccgtagttgaccatgcgcacgttcaggttgagtttcgcgctgacggtcacatccttcggcgtgtcctcggcccgtttgtgcgtgcccgtgttcgtcgggttcgaggcgtcccatgcggtccacgccttgacggtcggatggaaccggtagccgtggggcgcgcccttgacggcgaccgacaggccgatggaaccggtgcccgggttcacggtcggcgactggctggtcggctccaacaggcggtagcaggtgtacacctgcgtgacggtcccgtcgatggtttccgtggtgagtttcggctcgtagccgggcgtgtggtccacccagcccatcttctccgcgtcgaacgtgaccttgtccttcgggtagggcagttcgaaccggaagccgacgcgcgtgcgccggtaatagtccatggtcgagtcgggggtgagcgtgtactcgtagtcgtaggtcaccgtatcgtaggagcggacgatgtcgttggtttcgtccttgtcgtcgccgcgttcgttgtccttgtcgaacggcgcggtgccggtgatgcggtcggtgagcctgagcctgctcacggcggcgctgtccgtgtcgagcatgtcgtggatggtcacgtccggcgcggcctgacccgcgtccgcctgcggagcggattgcgcgggcgcaccggtgtcggattgttcgtccgccccggttccggcctcgtcgccggaaccggtgtcgggtttcgtcgcggcctcgtcgccgcctgtggtcgtcttcacgtcgggttcggtttggattcgcgtggacgtgcccatggtcgtatcgtccgcatacgcggcggaaacggccgacgcgcctgagccgaacagcgtcgcggtcgcgagtatgagcgcggcgacctttctcagaccgggtttcatcgcttttcggttcctttcggggatgtgccgtgacaagtggagggaagtatgaatacggctgttttaatggtgtggaggatgggtcccaagtacggtttgcaggagagttcccgggacccgtcccccggctcacgccgtccgaccgtctccggtcgggtggcggtgattcgtcggggagggcgaagtctgtggttcattcatgtgaagtcaatggagggcgttccggccgtcatcggacgacgaggccggagcgccacggggtcacttgcccgcgttcacggccgtgtggcggccggaaccctgtgcgtagtggcgcttgcggaacacgagcagggagccgcccgcgagcagcaccgccagggcgccgccggcaaggccgagcacggccacgccggtggaggccaacggcttggcacggtatccgttccagtcgtcggtgttgctggtggtctgggtgtcggcgcacagctgcttgccgtcgatctcggtcacgtcgccggtggagtattccggatcggtgtcttcgccgccgtcggtcttgtcgttgaacgggtcgccgttggacggcgcgcattccacgagcggggtgccggtgacgatggcgcggtccgtgtgggtatcgccttccttgacgcccttgagcgtgccggtcacgctgaccgactcgcccggcttgagcaccagggtgtcccagtcggcgggataggcgagcgaatccatgtccacgtgcgcgtcgccgacgatggtggagtcggcgaggtccaggtcgcttgccttgtaccatgcgccgtcgccggtggccgggtcggtcttggaggtgttggtgatgatgaacgtgatgccgatgttgtcggcgtccatcttcagcgcctgcttcgggtcgtcgcggtccgcctgctcctggccttcctgcttgagggtcggggtatcgaccttctccaggtggatgctcggggtcatgtccggggtcttggtgacgaccttgttggattcgcgcggctggccgttgatggtctcggtccacgtgttgggcacctcgtcggccacggcgatgcgcttgcactggaggtagagcctccagccggcctcgtgctcgttgtcggcgctcaccaggtcgaggtaggcctgggtcgcgttgaccgtgaccttgccgttgccgtcggcgtccacggtgaacaggttgccgccgaacttcgaggagtcgaagccgctgcccgcgatcttctcgcccctggccgcgagcacctggccgcccctgtacaaatcacgcgaggcgtagacggcccagttgcccaggtactggtcgtactcggtgttcagctggtccgtgccgccccagtccgtgacggtctggtaggcgcggtccgggggcaggatgctggaatccaggcggtagaggaacgtgtggttcagatacacgctcttgccgtcgatgctgtcgccgccgacctgcacggtcacgtccttcttcgggttgatctccttcaacgggttggagacggtgttggtcttgtcacgcttgtcgttggtgacctgcgtggcggtgttctccaccgtgtggccgtccttgaccttggtgacggtcatcggcatgaccaccgtgaagtcgtggccgagcagcgactggtcgatgctcggatccttcaacgggtcgtaatccttgtcggacttctcgctgtacgccttcaggtcgtcgggctgcgggtcgccgggaacggtctcgccggtcgcggggatctgggtgtccacggtcctggcgaacgtgtagagcacgccgtccttgtcctggatgttgaactcgccggtgcggtccctgccggtctcgtcaaggatctccacatgcttcgcgtcgagggtcaggtactcctggtcgtagtcgtccaccatgcccaagcgccacaccttgtaggcggtgtcggtgagcctggaggcgtcgatgtgcacgcggtagtacaccttgtcgcccagcagcgcggtcttgccgtcgatgttgatggtcggatccttctgggtgtcctccttcttcggcttgatcgtcggcggctcgttctcgaccttgttggacggggtgacgccgttgttgacggtcagcgcggccttgttgtcgacggtcttgtcggtgggcgcgtcctcgttcaccttggcctcgaagcgcagcagcacgcgcgggttggagccggccttccagttggcggcaacccagtccttcgtgaacgtggcctcgaacgagtggttggctctcgtcccactgcaccttgtaggcgctcttcgggatgatgccgccggttcccaggtcggtgatctccagggtctgcttgttcgcggtggtgtactcggaataggtgtcgctcagcttgatggcggtcaccgaatatgcctggtccgcagggatctgcgggtccacgcgcacggtgtattccacggtctggccggggaacacggtcttggtgtcgatgctggactggtcgccgccctgggaggattcggcgatgacctgcttgtggatcgggggcacggtcacgcagatcttcggcgtgttggtgtccaccgtgctgccgccgaccgtctggccgcccttgttgtcgaggtcgtcgcccttcgggtcaacgcacgtgttgagctcgtcgccctccgccttgccgtaggattcgagcagctgcttggtgtcgaagttcacgtcgaaggggatcacgacgctgatctgcttcgcggtcttcaggtccttctgcgcggcctcgtaggagtccttcgcgctgaccgtgaccttggtgccctcggcggtgatgtcgaactggtcggtcacgtccctgccggtcttgttcaggtcgttgacgccggcgttggcctcgtcggtggtgtcctgctcgtagaccttgatgttggaggtgtccttcaggtcgaggatgctatcgacgttggcgaagtcgtcggtccacgcgatctcgggcacgcggcccaatcctgtgggcagggtgccggagatgaccgccgccacctcgtcgccgagacggtagtacttgtcgtcgccgcccaccttgtcgcttttggccggatcgacggtcagctgccacttgccgccgaccttcatggcccacgccttgttcgggttcggggtccacacgaacaccggcggctcgttggtcggtcgggtctcgttgttccacttctcgtacgccttgttggtcagctggatcttcctgccctcggtggcaccctttttgatggtgcccgtcaggtagaacctgaccttgctcgcgctgttcctgaacatcgtcttcgcgatgtacgaagccttcgcggtggcggtcgcggtcccggccttccggtcgatcgcgatggtgaagttcgcggtctcgtccttgccgtcgacgaacaccttgccggacttccagtcgatccactggatcgaaccggtcagatcatcggtgatggaataggatgccagcgggttgagcaagtggctcgggatgctgccgttgacgaccacgcccacctggtcgcccacgaggaacgtcttctgatcgacgccctgctggttggtccattgcttgtcctcggccacgagagcgccggactcgtccagcacccacaccttgtccggggtcggcgtgaccttgcccacgctgtcgctgttgccggtctggcagtcggccaggctgccggtgccgttgtctccgttccagcacgccacggaaccgtcgttgatctcgtagtcgccgccggtgggcttggccgactgtggcacgttcagcgtgtagaggccggaatgcggggcggtggcgtgcgccttgaccacgcgcttgccatcgatggaatcgtcgatggaaatgtccgccggcacgatgttgccgttcgcgtcggtcacggtcaccttgctcacgtcgtcctgctcggtgccgccgatcaccacgtccctggtgtcgatcgtgtcgtagatccagaacttgccggaggcgttggaatgcgccttgatgtgcgccgtgtacagcgagccggacgcgatggagtcgttgccgtcccgcaccgtgtcgccggccccgttggtcagccatttctcgggcggggtggtggtcttctcgccggactccttgccgtcgttctctcccttgtgggagaccgcctcggccatgttgccctgcttcgccacgtcaacgtcccaccagcgcttgcccgcaggccacgactcccacgaggcgtccatgtccttgaaggacgcgctcactgtggcgctgcccttgttggacgcggtgaactgcttcgccaccgtcttctcggtgccgtcgatgccacgccagtgcagggtcgcggtgccgttcacgttctcggtcttcgacccgtcgctggacagggtgatcgtgtccgaagcgtccttggtgtcgcccgactggcccgacatctccgcagcctgcgtgctcacgctcagatgataggtcggcggcttcggctggtacttgtccagcacgatgatgatcaggttcggcgttgcgccggccgcagccacgttcgaatacgcgatcttgtccacgctgttcgacggatcatcatcaaacggagtggaagtaccatactcctgcgtacctgcgtagtaatacttatacggtttgatctgcgagtcccaggacgagtaccattcggacgccgaatagccgccggacccgttgtacacccatctgccgccctgctggcccgcgaccgagcccacgcccacgacacggcagtcgccgtcgccctcgcccggatgacgctgacggaacccggccacgcacttcgacagcgcgccccgcaacgtatcgcggatcgcccccggcccgtcgtacacgccgtcgttcaccacactcacgccggcacgcttgtacgcggcctccaccgacgcgatgcgcggcgagccgtccgcgttcgcggccggaccgaagctgccggacgcgtcgtccttgtactgccagaacatgcccgcgggaaggccgccggtcgcgccgcccggacggttgtctcccgcgccgcccgcatacgcggtcgacgccaccaggccgcccgtggccagcgtggccacggccaccaggccggcaagcaccgtgcgtgccggccccgccccatgcgcgccacgcgcgaacggttcatgactccgcccggccgacgccctatcatgacgaaaacccataagggtctcctccctgtgttgatcaacaggacgggcctctcccgcccctcacggaaccggccccacaggccggactccgcgacccccacccgcacaccccggaaaaccacaccgatatcacaggaaaaacacaggggaacagaaaccaagaaatgaaaaatcccgtaccagataaccggtacgggatagatagttttttattaatgcttaattggaggaagggatgcgcagccatccgtgcatgtgccgattccgtgtcctccgctgattggtccgctggaggcggaacccccaccgttgccgcctccggtcgcgggcggcgtgtacgtgcctcctcccgtgtagccgccaccggtgtagccgccgccggtgtagccggtgccgccgccgtacgagtagccgccgccataggactgggcctgctgctgcgcctgcgcctgggccgccgcctgggcctcccgttcggcctgggccttctcctcggcctcccttctggccttcgcgtcggcgtcggccttcgccttggccttgaccgacccgtccaccgcgttcacggcctcgccgatcgcgtccgcgtccctgtccttgatggcctgctccaacatgctacgggtcttctcgtcggcgaccctgcccttcgaatcggcgagcagcttctccgcgtcctcgaccgtcctgtcgagcctcgaggattccaccgccttgacggccttcccgagcgatgcggtatgggtcttgtaccaggcggcctgcctgtcgagcttcgacgtcgcctcgtccaaaccggccttggaaccggccaagcacccctcatactcgggcaccgtggtcttcaacgccttggccagcgcgtccacggtcctcgcgtccttcacctggtcgacggtgaccgccgaggcgtcggcggcctggccgttgacgaccgcattgtagtcgttcgccgcgccacgcaccccgtccgccgccacggcgcaagcctccttcgcctcggccagttcgcgcgccgaccacatacggtagccggccacaccgcccacggcgagcagcaccagcacgcaacccgccgccacgggtgccagccacttcggacgcctgcgaaccgtctcaggctcgggcaccacgcccacgccgtccggggacggcaccttgtcctcttcgctcatcctcgttcctttcctatcatcggaccaaccgccggcaccccttccgggagagagggacggtccgcatgaacacatcctatgccacggccggcgatcccgccggccggcatgccatccacccgacaatccgccgatatcgggggagcggaaggggaagccggaccggcggcgctccccttcagtacacgcaagtcacggcaaccaggagccacagaagggcggcgtacgctggatcccgtccatgccggcggcgtgaggaatcatcggggccgacggatggccttgcgataacctttggattccggatcccattccacggtgaatcgttccctcaacagatccagcacggcatagaccttgcggcatgcatgaggattgaccggacggatctttccatgaggcgtggcctcggaggccgcctgatataagcgaatatcctcttcggtcagcagcccgctgagatcgatgttcgcgtgctccggagcctttggaatgggggcggcttcaacctccgcatcgatctctcgcatatccgcgcactgggtgcgaccgaatccgcaatagctgaacatggaatccgcatgcctgcgaatcgtatccttgccggccagctccctgaacgcggatagtccgatttcatcggatctgaatggcaggaagaaatcccgggagattctgagtcgtaacgtaccgtccggcaatgggatacgttcgatgtgatgcctggtcagaacggcccgaagtaattgctccgcatcgtccacatgatccggataatcctccgcggacgtcatctgacggaccatccacgggacggggaattccaggaacgggtcaaagggcgtccctgggccaaagcctccagaagctgccgtgggatggcatcatcccggttccagacaaggaacaggtcatcacggtcaaggttcgtggacgaagccagctcgtcgtcgcccacctcgacggatatgtccctgtcctcatccagataataggtgatgttgatggttcctctcggggaaggggaaacgcatggcacgatacggctgacagcggagacccgggacaggaaggcgcgcgcgttccgaatgatcatccgggagggcgtgaacgtgccggggccggcccagccatctttcatgtccaggaaatccacgatggccgacccgccgccgtagtccgattcctgcgggtatctgtcgtctgatgccagatcgagtcgcgattggcggggaagcgagagcggcagacggtccctcacctgtctccaggacaggggctgcctcgtccgaagcgtctccaagagttcggctgttttcattggtcctccccaacgccgaacgtgtcccttatcggctcgatgagggtgaagaacattctatgcgcgatgtcatgttcctccgacagggaatccatcacggaacgcaggtccgtgtcgatggacgagcgattcgagatctgcatcatcagggccacgcctgcacgactgggatccgcggggcgtccggcgatgcgtgtcatgtccgccaccttgatggtcgcgtccaatccgcagccggcgagatgccgattgacgtatgcctggaccgattcatcacctttggaagggaatccttcgtcaatccggtcgggaagggcgatggaaaaaccaagaacgtccctgatgaaatgggaggaatcccttcctgtgatttccgtcgggaaccagtcgtcataccggatggaaaccgaatcgaagcacgtggcacccacggtcttattcaatgcctgtagaagtatgtctatgcccgattcgatgacgggagcgaaggaatcccagttggaatagttatccggctttgtcatgtcgatgcggaaccggtcgacgtccaggtcgaagctgatgccttcccgttcgttctgcagctggtagctgtatgggtaatcgcctgtggaccagccgtcgttcttgacgatgcagataatcgaaccatcgggctgggaatccttgaaacgaagctgataattcgagaagaaatcctccggaccctgtgagggcgggttttccggtatggaccaggtcagcgtgatgctcagcccgtcgagaggagcgttcctcagtgtgttctctctcacgccatcctcctatgacccaccctacatatatcggggtacccgattaaacatatccccatgcattcccaatgacaagccgtttcccggcatgatacccgtaatggttgcacccggaaacacgcatatcgggggtcaccaagccagactcatacggtctggatatcgtcggttcggcaaagacggaaacacgccgccttctcggagacatgggtgagccagtcgccgaccaacgacagggccaattccgtgtaggcattgtcgacaccgggcatcgtacgcagattgaaggtctaccagaatcggctgcgagcataaacatggccagcgaacgcataccacggcacatggaatacatcagaaacttggtcgaggccatgctcgacatcctcgaaatcatcctgaacctgcccgccgcccggaaccacgatctggtggcgctgctcgccatcggctgcctcgtggcgctgtcgctcctgcgcgtcatggcggccgcgagaaatcttcttgcccgcgtccgtgcgcggggacgccacgcacgccacaacgtccgggagggtggaaagggcagacaaagccgaatcgcgcgccatgcccgccgcggccgtacgcggctcaagatccgcttcgaggtggaacacgaacacgaacgggaggaatgaccggcggtacgcgtcaccggtagtccggaccgggattcccgccgtcgccgcgcagcagggcccatgcgaggaacaggtccgccagtaccgctcctgtcaggtcgaacgcctgccagggcgcgaacggcgcgccccacggctcccggaacgcgagcgaacccaaccccgcctgcatcgcctccaccgccaacgccagcatgaacaggcgggcgcgacgcgaacccagaccctcgcgcgaaccctcctcacgggacaggagcgcgcagcacatcagtacacccagcaagtacagggcctccaaggccacgtccatcgggttcatgtcctcgccttccccgaaaggagctgccggcatcggccgcacaacccgtccggcgagcccttccgccgcggcgcgccgcaacgagaacaggatggcaacacacggtgcgcccggcacctgccgcacatgtcctcgccctcgaggcaccggcacctgccgcatttcgggcacatcggcctggcctgttcccggaccagtttcaggcatcgggcgcacaacccgtccacgggacggctcgtccgcctcccgcattcccggcagcggggcagatcctccaagtgacggcactgggcgcacaacgtgtcgccggcacggacccggcgcctatggcatttcggacagatcaccccctgctcgatccggcggcgtttctcggcggcgagcttgagcagacggatcctctggggcatgccggaccggcaccactccacataccccggatcggccggggacaggacccgcaacccatgcggacccccggccttgccggcacggaccccggcaggagcatcagccatacgaaacctccctgaacggaaaaagcacatgatcgccgacgccgacacccacgaaggacgcctatatcgtcaacggcgccagcgcggcacgaccggcgaaccgtcacgcagacggaaccgctgctccatcaccacacgtcccccttccagccatgacaagtggcgtttgaccgtgcccacgctgcacttgcaccacgcggccagcttcctgtgcgtcggatgcgtgttgcgcccctcggcgggagtcttgcagacgtgcgcgcagcatgggcacgcgcggcacgggaacgtcgagcatcatcgacaggtagaagtcgtggctgccgtccgacgggcaggccgccaacaggcccgaagcggaaccacgggccgggaagccgccatgacgcccggcacgctcaagcgtttcatgcgctctcatggctctcctcacccacggaaccggccgactcctcacgccaacgggcctcgagcatgtcgcggcgcgtggccgcgcggcacagggcgaacgtcagcagacaggacgcggcgagaatgatgacgacggcgatcacgagtacgaggtgcatcatcggcccgcccccattgatcgcgcgaggatggcgcgttcgatgagtccggaaccctctgaccgacacgacatgaccgattccttcctgtttcctgatccgtttgcccgtacacgcgtgcgccggaccgataaccgtatggcggcccgtcatcgcgtgccggaggcgagcgaggcgaccatggcgccgatgccctgggagagccggtccatgtccgccggggacgcggacccgtcgtcgagcagccccgccgcctgttccgtgagctgttcgagccgacggtacaggtacggcaccttgtactggtccgccgtgctccccgccagcaggccccgcgcgtcggccacggcccgttcgagccggctcctggcccgtgacgattcggcgtcgccgaccgtctgtccggccttcgccacggccttttccagccgttccgaccgtttcgcgagcatgtcggcggccttggagatgcgtttcgcgtccgcgtcgagcgttgccgcgtcgcctccggccgtgcagccggccggcgtgacggggtcggaggaaagccgttcgagggtgcccgccatatcggggtccgtggcgcgcagcgcgtcgaggtcgaccgatcccatgatccggtcgcggtcacggccccattcggccgatcccgcggaccatgcccgggcggatcgttcgcacgccgccgacgcgtcggccagccgttcgcgccggttcgcggagaccatgcccgcagtcagcccggccccgaccatgagacccgtgacgatcaccgtcgccacgcccacacgcaccccgatacggggcctggtgcgggcctcggcctcgtccccgtcgtccttcccatgccggccgggccatgggaatcgccgtttcccaccaggccgcacggcgtccaacccgggcatgacctcgtcgaaccagtcctcctggccgtgcgcgcccatggtcacaaccccagcggcaggaccgcggtcaacgcctgccgctgctggccgcgcaggccggacaggcgcagatggtacttgccgacgcgcacgcgcaggtcgcgttcgaacacggccagcatgtcgcggtccggggcgaacagggtgatgaacccctgatggtcggtgtcgggccagttcgcgtcctgctccgcctcccgctgccgctgctcgcggcgctcacggcgttcgtcgcgcgacagtttccgctggttctgcaacgtgtcgcgctgcaggatgctggactcgcggtcacgcaggtccttctcgcttttctccatgctcatgggcctccagatatgggtcagggcgatcatcctgccgccctgcaggatgtcgcgcgtccagcccgccggcacgggccggtcgggccactgggtcacccaccaggtgcgcgccacgcacgattccagggtcacgctctccccgtcgaggctctcctcgcaccagcccagcgtcggctcgtcgcgggtgaccggaggacggtccgcgttgccggccggatccgaaaccgaccggatcagcgtgcgcaggtcgtccagtccgcaccagcgcaccgaaccgggacgcgccccgcattcgaccagggccggggcgacggtcatcttcaccaggtcgcccaacgcgaccccgacccgatcgcgttccgtgagccggccccgggcgcggtccacgcccttgagccggtccacgtcgcaggtcacggacacgtagctcacgttcgccaacggggtcatgacctccggcagggcccacaattccgccatgtcgcggcgcatccactccggcgacccgccatcgtcgggcaggtccggcgcgggcgcggctcccggcagcaggagcgcggtctccttgagctcgaccactcccggcgtgtccgccagacgggcggtcagatcgttcaaggcggccgcgcgcgacgatttcgacgcatccgtgctcaacgtccactcctcgaccttcaacgcgagcaccgcggtcgcccgccggcgttccgggtcgaacaggtagcaggcgccatggaacggggttccgaccacctccacgccggacccctcgaccacctgggcccgggacccgacctggccccacacgcccagcacgcccgccggccggcccgaggcgagcgggctcgccgaccatcgggtcgacccgtcgcgcacacgccgccgccacgccagccatacgtacgtccacgccatcaggctcaacccctcgtaacggatcagcccgtacgccatgaccacgccgcccgcgagcatcaacggcagtaccatgcccgccgccgcgccgcccacgaccatgaccaggccggccaggcccacgccgatctgcggccatgtccacccgaacaagacattcgtggccgacaggcggctgaacgccgccgtgggcaccctcgccccgtcgtccctgccgtcagcatccaccatcagcaactgtgttttagcaagttggcgtccgctttgtgagcggtgtttttccgcagtgtaggcagcgggttttccgcagggtgtgcggtatcggccgctgcctgtctgcgttgtgttggttatttggtcatgagggcgtgttcgcttcggtaggagcggccctcgaatctgatgagccgtccgtggtggacggtgcggtcgatgagggcggcggccatgttcttgtcgccgagcacgcgtccccatccgctgaattcgatgttggtggtgtagatgatgctccttgtctcgtaggaatcggaaatgatctggaagaggagcctgctgccctcctcgtctatgggcaggtagccgaactcgtcgatgatgagaagtcgggccttgccgatgctcgcgagttcccggtcgagccggttctcctgctgggcgcggcgcagacgcatgagcagtccggtcgcggtgaagaagcgcaccgggacgccccgctcgcaggcgagccgtccgatcgcgatggccaggtggctcttgccggtgccgacgggcccgtagagcacgaggtcctcgcatccggcgacgaagtcgaggttctcgagctgcgcgcgcccccagtcggcgggcatcttcaggttggtccagtcatagccgtcgagggtcttgtcggcggggaacccggcctgtttgagcaggcgcaggcgtttggatcgctcgcgcgagtcgagttcggccgtgaaccatcgttcgatgaagtcgagctggttgggcgtggcctcggcgagcgtgcccgcgagcacgctgcgtgtcagggtcaggctgcggctcatcttcaggatcctctcgctcttctcggtcgtggacgcgcgacggcggcgggtctccgggatcaccggatcgggtctgacgctcaccgttcttcccctccgtcgtccgtgccggtgatgaaccggtcgtagccgctcaggtcgggctcctcgatcccgccggggtattcccactcgccgtcgcgcatgcgcaacgcgataggggtgagcgagtccgcgtgcaggcccatgtccctgttcgagcgcaggatctcgccgcacgcctgcatcgcgggatcgaacccggccgcccggcacgcgtccccgatcgctttgaggctctccctcaacgtcttttcgtccatggaatcaagccacgcgcgtatatcgtcgggcacgtccgggcggatcgagctttcccgccacgcgcggggtttgaccgcgagccggggaagcacgagcgcgggatcctccacattgcgcgaccgtccgtactgtctgggatactccgcgaagagctcgccggtggcgggcgatgcgagcgtgaccgtgtcccaccggatcgcggccaataccctggaacgcgccgaatcggggccggcgaggtaccggttcgagtcgatgtcgaccagcccgtacttgtcggccgtccggctttcccagcgaaccgggtcgaacgccgtggacggcaacggcatcaacgcggccctctcctcgtcgaacacctcggccacgggcacgcccggcaacctcgggcaatacgagtccctggcgagcccgtcgcaccgctcaagcatgaaacgactgagctgcccgtaggattccgcgtgcatgggcggcaccatgagattgcgccgcaaaaacccgaccgcgttctccacgctgcccttctcgttgcccgagtacgggttgcagaaccggacctcgagccggtaatgcgccacgaacgcggagaacaccccggtcaacgcgacctcgcccttcgcgttgcgccggccggcaccggtcgcgttgtccatcacgatcacgggaggaacacccccgatatgctcgaacacgagcatcaggccatggcacagacactccgcgttctcgcccggcaacgccacgcacaaccgcatgttcgaatacggcaacgaggccaccaggcaatgcacgtccgccatctcgccagcgatccgggcccgggccacgccgaaatcgacctgcatgctgcccgccgcccactcgagccgcacgtacccctcgcgatccggcacgccgcggttcgcctcgcgccaccggtgcacgtaacgcatcgtggtcgaatactcgccgtcgtagtccgtctccgccagcagacggtcgtgcacgcgcctgatcgtgtgccgctgcttcctgggcagcagacgatcggcctccagccacccgtccaccagatgcgcgtacgggtcgatcttcgacccgtacctgcgatccgccttcggcttgggcgagcaatcctccatatccgcgtacttcgcgaccgtcccgcgatccacgtgaagacgccgcgctatctgcgcgcgcgacattccctgccggtcgagtctcctgatatcttgcacaatgggcatcggtatcgccatgttcctttccttcccgagcgccggccggcggcaaccggccgaatcaaaaccgattggcaactcgggaatatacaggcggcggcaccgatgcctctcacatcaccgggaaacgatgacgacaccggggaaaaccatcagcccacactacggaaaaacactgccgaacctgtcgaacaaacattgaagcaaaacacatcagcaacctccgatcaaacaagaaaaaagggccgggcgcgatccccgcccatacggggacgccacccggcacctcatcgataagtcaggccaggaccgggcccgacggcgactgcggcgagaccgggggcgccggcgccgcgtccggtccgggcatcccggcaggtcccggatcgcccggagaccccggggtgccggacgatccggtccggccctcgccgccggcaccgcccaggcctccctcgccgccgatcccgtcggcaccgtccgaaccgtcacggcccgcgacgccccggccaccgtcccctccctcgccgccgggcgcggttccggcggacgacgcgccatcgggcgacggaatggccgagccatccgggcccgggggagcggagaccggcggctcgtacccgtcgtccttcgacgggtcggcggcatgggcgccggaatcccgggccccgccgccatcatccttgtccttgccgtcggccttggagccggcgagcatttttccggcctgttcgccgacctgcccccattggccggtcagggcggccagcccgccctgcgccatgccgggcaactgcacgcccgccgccgcggccccgccggtcgccaccccggcggccgcggtcacgacctgccgggtcagctgggccgcggtcaccagcgcgttccggcccgcctggctcgcggcctgctgcatgcccatgctccggtcgtcgcccaggaactgcacgaccggcatgatcatcttcggcgaatagcaggccatgtagatcgcggcgatgccgaccagcagatcccagaaactgccctcgcccacgcccgacgtggtctgcgaggtcatcagcgccgacccgaccgtgatcaccagcgcggccaacggcttggccagcatcacgcccaccacggccgaaagccagcggcgcatcgccggccgggtcgccttccagccggcgctcatcaccggcaagggggcgatcgcggccagcagcaccaggcacagggtgcgggccgcgagcatgcagcacaggaggaacacgcccacgaacaacaccagatagacgagcagcatcgtcagcgaatgcaggacggacgcctgctccaggatcttcttgaacatggccgacaccatcgactccatgccccggcccttggtcgtgtccgcgcccaccgcgaggatcctcgcggacaggaggctcacgatcccctcgcacgtgatcatcacgctcacgcagatcgcggtcaacggccatgcgagcaccgccatcgcgaacgacttgaccgactccgccgggctggccttcacggccgcatgcaccgcgcccaccgcgcatatgagcatgttcacgaaccccatcacccagccgatcctgttcgcggccgtgatcgccacgttccactccgcgtacgacacggatccggcggtcgacgagaacgcgcccaccatcatgccctgcaacgccttgcccatcgggtccagcatccacgggaacagcttctgcagcaccgcctcgacgatatcgcccacgacagcctcccaacaacggaaaaacagcaaagaaaggaaagggcccgccccgacggcgggacgggcccggaggaaaaggggacgggccccgaggtcagaacagggcctgcgtggacgcgaacttgacgatcgccatggccgagccgagcagcatcatgcccagcgcgatccacacgaacacgatgccgctgtactgctgcatcgtgctgttgtggatcgccttggacacgacccaggagaacgcggcgatgatccacgcggccgtcgccacgaagatgcccaaagcccacaggccgcccacgatgttcgacaccaggctcatgaacgggaagaacgtccagttcggggacacggagaacccggacaggtcgttgtcggtcaacgccagcgcgatatcggacgcggtggcggcgattggatgaataatggtcatgattcaccctcctttccccaccgccaccgggcccgtacgacgcccgacgccgataacgggccggacggctcagccgaacagggacgaccataggtcgcccgccgcctggcccgtcttctcgaacacgttgcccttcccgtcgccgccggacagccagtcccaggccccggacgcggcgtccccggccttctggaacacgttgcccttcccgtccccgcccgacagccagtcccaggcgcccgaagcggcgtcgcccgccgcctggccggccttctggaacacgttgcccttcccgtcgccgccggacagccactgccacgccttcttgcccgtcgacagggccttgtcgatcgcgtcgcccgcggccttgcccacacggttcgcgatgtcctcgcccaactgccggaccacgccgcccagatcgtccgacttcttcgcctcgtcgttcttcacgcccttccagtcgggatgaccgttcgcggactggtacgagtcgttcactgccagcccgtccgtgccgaacgcgcccgcgccccacgcgaacccgctcgtcgccgcgccgatcgtcaacgggatcatcaacgcgcacagcagccgcttccaggagaaggcgcgctccatcatgttgttcgtgatcaggcccggcagcagggtcagcacgccgacgatcaccatcgcgaccgccgcgtacaggcacaccgctatcacgccccccgccaggtccctgaaccccgccacatcccacgcgggatcggggaacaggttgatcagcgaatcatcggccaacaccatcccggacatcacagcctccctcatcacaagcctccacggcccgacaacacgggcccgcacatccaccacgcgccggcacggcccacggccgataacgggccggaaaaaaaggaaaggccccacgcccgggggaggggcatggggccgtgaaggaaagcggccccccggcgcacgggaaaaaagagaagaaaaatcatgcgccggccggcccgggaacgccatgagacgaccgctcccggaaaaaccacccgaacggacgccgataatctcagtaccagcccttggccctgcgttccgcgtacgcggcgcacggcgtcccgtacctgtcacgaatgtatttcaggccccagtcgatctgcgtggccgcgttcgtccgccaatcctggccggccgaggccatcttctccgccggcagcgactgggggatgccgtacgcgccgctgtccgggttggtggcgtcccaccgccagcccgactcctcggtgaagatcgtgtccaggcattcgaactgggaaccgtcatcccagcccatgtccttcatcttgcgcttcgcgatcctcttcgcctcctccacgctcgccttctcgccgtcctggtcgcccgccgagcacgtcgccgccgacgaggaacccccgccggccccgtggatcgggtccttgggcaggatgaagttcgcgccgcccgcgatgggcagctcgcgcgacgtgtacaccgggccatgcgcgttcatctcgctgatcgtgaacgtgcccttcgacgcgtccaccgactcgaccacggccacatgcccggccgccggatcagcgccctgcacgccgggcgggaaactcacgatcgcgcccggcaccggggccgtccgcgtcaccctgtaaccctccgcggccgcggacgaggcccacatgccgccatcgccccaatactggcccacatgcttccaccccagacggtaggcgcgcaggcacgcgccccacgtgcactggccctgcggatacgagacgcacgtattgcccggaccggccaggccgccgaaccatgcggccttcgcctgctccgcgcccatcccgtcccaaccggaatccgacgtgccgcccgacaccgcctgcgagccctgcgaggccggcgcacggtacacgcgcgtgtaccgcgcgttcaacgtggacgtcacgccgatctcgtcaccggtctggtcgccgggcgtcctgccctcgaccccgtgcctctcgtcccaatgcgcgcccacgaactcgccatcacccatgtagatctccgtatgcccgtccgcccacacgacgtcgcccgcctgcagggacgccacatccctgaaatccgaccgttcgaaaccggccgccttcaacaccgaatccatgccgtcagtgttgaacgggctcgaccccacgtcgaaacccgcatggcgcaacgccgcccacacgaacgacgaacagtcgtaatccgggtcgcccccgcggttcggctgcgaatacccatgtttatcgtccttcgcgaccgacaccgcccaatccacccacgacgaggaacccgtcacgcaacgcgtccccagaccgtaatccgactgcagtatcgcgaccaccaggatcaccaggcacaacaacacgaccacgaccgtgagcagcggggccgcgaccaccatgccggccaccacgaacgccttgcccgacgacccccgcttcccctcgccaccagccatgcaagcctcccaacacgcgcgacgcacaatccggccatccacgccgccgccggcccgaatcccgccgatatcggaccaaagaagggatattggggataatgggaccatgtacatgccccagctgaccgaaaccgtccgaaccatcaggaaagaccatgcggctcatatcaaaggagatagccgactactgcaggcggaccaaccagtccacacgatggacggaacatgcgccatccggggaaacggagaacagattgccccgcaacatcatcgaagtgcagcgttacagccatctggactgaagacgatcgagcgcgccatccaccgcccgccgggcgacggcatggcccaaacccgcgatggccgctgcaagctcggcctcggtccggggcggatgcgatacaagctcgcgcacaccggaatccaatgtcgaatcaagggcctcccacgcggccggcacgcaatgctccctgagcccgtccgagaaatcaaacgcgcgcgacaataccagcagatcatgatccgtcaacggttcatcgaaaacaccccacatcaacggggcggaacgagccgattcttctacgcccacgcatacgcggaaaacacctccgacatcattgtcgtcggccggaccgccatgagccgaacccgtcatcgcacgcctcctcctgatcattgtcatggttgtcactcaagccatgcgacgcatgccatcgatatgcggacaaaacagggcggctcatctaaccgagacgtaatccctgaaggaagacaacgcccgggcgagggtcagggcggcatcggcgtccatacgcgacagcctccaacgccaccagcaggcggcctccaacggcaacgcgacctgacgcaggactaagcccaacaggatgagatcgccacctaccagaatctcgatcgtcgactggatcacaatggccgcgacggaccgtgcccccatacgtccttgacccgtcgcctattttgtgtcacaatattatcgtgaacatattcccttcggcgctcaagcacggcatcgaaccggatgacgccatgtacgtggtggagcatccgcttcgcgacatcgtgctgcgtgaggaccccctcaaggtcctgtatctgggtatatcaccggacggccttccactggaggtggtggtggccgacacatcgagggggccggcgctcatccatgcgatgcgcatgaggacccaatacgtgaaactgctggaaggaggcaggcaatggacatgaactacgacatcctctcctacgacgaactgccggccgacgaggccgcgatgctcaaggccgatgccgaggaggccgagaggggctacaccgacgagcagctatccgaggcgctgaagagaaccccaggccgtcccctagccgtgggcagcacccctgcctccaacgtgatccgcgtccgtctggacgacgaacgcgacgcgaagctggaacggtacatgcgcaaacaccacatgagccgcagcaatgcggtgcgcacgctcctagacaaggcgctggccgagatctgattctccgcccgaaggcaggccctccgtcccgcggcggagggcctgctgttttttcgacttacgttatacggccgatgtccgtgtttctcggcgtcccgcgcacgaagcggcagccgctcgtagatgggcgcgacggccgcagccgggacccgtcgagcacgtcgccggaccaggccctacgcggggacgtgaacctcatagccaatcgggctccatgccgataaggtcccgggcggtctgcggcaccggcctgtcgagggccttgagaaactcgtcgaacgccttggacggcagacgcgtgacggtctcctcctcgataccgcggtaagccggttccatcgtgatttctcccatatcccgattgtacgtcgtgaagtacatgccggtgacggacgggacgaatgataaaaggcctttcgttggacggcgtgcgcatccgatacacaggccggacccccgataacgggaaagattggtcacgccgcgcggaacgctcgtgccagtctggtcgcgttctccaggctcaccttcgacatgtccccattcttgagccacgcgttcacgttcccgacattcagtccgagttcacggcagattggcgcgacaggcacacccctctcccgtttcgcgcgaagacaggcatcccttctgatggatttcgagcgggcaagggtctccggcctgtgccagtcggcatagaaggagttcaacaccttccggtacctgtcaccggtggaagggtcgtagccgtgctccaacgcatagtcttggggggcgagttcccctagagaatcggccgcatgctcatattcacccctcagctcggaatcgtcggtcatggccatcagctcgggaaaacggtccgactgcagagcgtacagcaacaaaggctcgcgcagccgtccttcactatggcacgccatggcgcacagacgaggaaaatcgaatctcgacaatccggaaaggtgcaacaggtatctgcgcgaccacggctcgaagttggggcgtctcacgaatgatctccaatcatagggacggatgaggggcatcgagttctggcgatggctggtcatcggatgagaaggagggaaatccgaaagtcgtactcgtatcggaagaaaaggggtcgcgaccatccagaactgctattcgttggttgagcaggttccattgagcctctgtgatattgatacgaacctcggtaatgtccagaaggatgctgttcaaggtgctgcggttgatggacccattggaccacatattttcaaggtcccttcgatccttgtcgcctctccacgaaaggagtttcgttatggcgagatcctcgtttcccaaggtatatacgtcaagtaccgaaccatcaaattccacgggacgtatcctgtcgtgccagtgagtcgggtacatataccggaaagtgtccacatgagagttcatgtcataggcggacatcaaatcgacgacttcgtcgggcacggacagcacatcgatgtcggtggttacacgggaagggatgagtcctcgaatcgataaagcactgcctcctgagattacgagttcgaacctgcgcgcgccgccgaaacggaaatcaaggtcttcatcgagaagtctcagacgggatagtatcccctctttcccaaaagaggaatccatgatccacctccttattatataaaaccattttcttattatataaaatcggctgacattgatgaagatgatcaaggcacaggagccggatgcggaaaccggacatcgaggttcctgaacggcgaatctgaaatgggaaaagaatcggccggcggctcgcggcgtgcgggtgccggatgggaaggggccgaaagacggccccgcccatcaaggaggaccatcatggccgacatatcccgcaacaccacgccagcctggcaggacccgcatctcaaggaccgtggcgactacaccgaacaggacatccaaaacatccaggagaagggcggcatcctgcccgacttcacgctcgacgaggccgaggagacccacctgttcgcacgggtcgcacaggccctctcgaagaccctcacgcggcagggcctggccgtcaggcacgaggcgaaggccgccgccgaacccatgggctaccggctcgacgaacacgccatcgcgatcgacacccgccgcccatggaaggacatcgcgctcgacctcgcgcacgccctcggcaccgtccaggtcgcacgcgacgcgctcaacccggcggaccagccgcaaggagccgcggaatggaacaggtacaaggacaagggccgcatggtgggagaccagctgctcgcctccatcggactcctcaactcccactggcatgagaacaggggcgtcatccgcgcccacgcgctccaggcccgcgtcatggccgagcccgacctgcacgcacccctcggcgtctacgactggaacgccgcatggatcaccggggaaatcgccaccagaaaccccgaccccgcccagccgctcgccgtccaacccatccgcatccccgccaccaagccggaggacatccacctcgctctgcccgacgaccccgccaacccgttgcaggtcacggaccatccgatcatcacgccgcacgacgacctcgtggagaccacgggccggcacctgatcctcggcgcgggcatgccgaccatgctcatcgtcgacatggaccgcagcgacgccgccggcctcgatctggtccgccgggccgccacccgcgagagcacgttccaggggagtgtgagcgaatgcatccgccaggcgcaggcgacggcccccggctacgatcccgcacccgacgaggggccgaccgggctatggcccgccgcgaacatgttccccgaccccgccgcactgcccggcgcgatgcccatggaaacgccggaccgtcccggacccgcgcaggatgcgggcatggacggtccggccataggcgcgtgaccgcaggggcgggcggaagccgggctatccggccggctgcgcgttccgggcggcgatgccggccatcagcgtcgaaacctggccaagcagcaacgccagcgcggccatgtcgcccgcatcgccgtccgcgtccagcccggcgggagcgggaggcagcgaggcgatcgcgagcgacgggtccgcggacagcagataggcggcggtgcgttccgcggccttcctctgatgctccggcacggcacgcaggtaatgccgcaacgtggtctcctccctcacatgtccgagggcgtccatcgtctccttgagactgctgccatcgagcatgagacgggtggcatgggtcacgcgcagagtgcggaactgcaggtcgggacggcccgccgccttgcgggccttcatgaagtggttgcgcagagtgttctgacacaggatctcgccgcgcttggcctggaagaacatgtggttcgactggtccggacgatcctcgagatgcatgcgaatcaaaggaatcagcatgtccgggataggcaccgtacgccgggaccccttcgtcttcagcctgccgatccgggacgggcccagatcatccgcgccatggctgacgctgcgacggatcatcagcaccttgttctccaagtcgaagtccgtgtccatcagaccgcagacctcgccgatgcgcatgccgcccgcacaggccgcgagatacaccgacaaccgcgtatagcccggcatcgcattatatatatggtacagttcgtcgggcgtgaccggcggaatatccgacgacccggcctccggctcgggcggaatcggcagcgtgaacgggttctccgccaacaggggaggagcgcccttggagctcggcgcacacgcctcccgcaacagcatcttcaaccggatgcattccgagcggaactgccattccccgttcggatgcggcccgtaataccattcggtcaccagctcctcggtcaactcggccagtttcacgtcgccgaacgcctccttgagatgcttgatgtcattgcgcaggttacgcaacgtcgagcccgcgatctcggctccgtccttcctgcgatgccggcgcacatacccgtcggcgaacacgccgaacgtcagcttcggcgtcaacgtgttcccatcccggtcccgtggaggaatccacgtcatcatcccacgacggtgcagatcgacgatcgacctctcggtctcgagccaatcctcggcatcgccccgcctgcccggcgcgaaacgtttcgacacacgctgaccattgatcggcgagatataacgagcctcgatgctcgtgacatcccctgtcgaacccttgcgttcgagaatgcacccaaaacgcctgcggcgcaagggcctctttgtctcttcaaccatcttcggcctccttcagccaataaaaaaccgtcttcgcgcagcgcacaccctaaagaacacggtcaccttggtaaaccctgcatctatgtggacactccgcgaaaacggaaactccattctcccacacgccgatatttgacaggccgcgtccgaagccgctactcttgactgccgtacaaaacgggaacggttcagcgtgcgggcaaaactcgcagagaaaccgcgaacaggatgtacaggagggtaaactgagtcagaagcgattcctgacaaggaattgccctcagctcggcagggtatgcgaaggtggtgggttcgagtcccatcgagggcactttagttaggagttcgctgaaattattgtgaaccccattgttgggtaattcaagaaagaggttggcatggctgcaaggaagaagtccgaagaaccgagtatcaacatcgatgaggtgctgaccgacgaagagctcaaggccgtggccaatgaaagcgaacctgctgagcgcaaggccaagcccgaggacggtccgcgtaccgttgtcgtggccgaggacgaagccgtgaaccgcatggatctggtcgccatgctggaagacaacggttatgaggtcgttggtcaggccgccaacggcgaggaagccgtggaactgacccgcaagtaccgccctgatgtggtgtgcatggatgtcaagatgccgcgtatggacggcatcaccgctgccggcattatctgcgatgaaaacatcgcccccgtcgtcatgctcaccgcattctcccagaccgatctggtgaagaaggccaccggcgctggcgccatggcatacgtcaccaagccgtacgaggaatccaagctactgccgaccctcgaggtggccatgggccgtttcgccgagatcaacgatttgctggacaacgtggagcgtagcgaacgcaagctcaaggaaaccaccgaccagctcagggaaaccgaagagaagctcaagaaggccgaagacacgcttgaggagcgcaagctcgtcgaccgcgccaagggtctgctgatggacaaggcggacttctccgagcagggtgccttccgttggattcagaagacctccatggaccagcgcatccccaagaagcgcctggctcaggccatcatcgccaagtacggcgatccgaagccttctgattcgggcgaacgctgattatcggcgtcgccgtgctgagtcgtaaagcaacacaaacacactatgggagaggccagcgtgaccgtacccaccaatgaaacattgctggtggtggacggccactcgctggccttccgtgcatttttcgccctgccggtcgacaacttcagtacctccagcggccaggccaccaacgccgtctggggttttgccaccatgctcgcgcaggtgatcgatgcggagaagcccgaccatctgggcgtcgccttcgatgtgaagggcggcacattccgcaatgagatgcttccgcaatacaaaggcacccgtgaggcggctcccgaagagctgctcacccagctgccattgattcaacgcatgctcacggccctcggcgtcacctacatcgagaagccgggattcgagggcgacgatgtgatcgccaccctcgccaccatgggagacaaggccggctaccacacactggtattgtccggagaccgagacgccttccagctggtggatgacaacgtcaccgtgttgtacccgggtcatcacttcaaagacctgaagcatatgacgccgcagtccatcatcgacaaatacaaagtcactcccgcacaatatccggatctggcggcactccgaggcgaaaccgccgacaatattcccggtgtgcccggtgtaggcgacggctttgcggccaagtggattaaccaattcggttccctcgacggcatttgcgagcatgccgatgaaatcggcggcaaaaaaggcgaatcactgcgggccaatatcgatcaggtcaaactcaatcgcaaagtcaacgcattggtacgagacgtcgatctaggcgtcgatatcgaggatctgacattcggcaccgtggacgtggcacagatcgacgccctgttcaaggagcttgaattcggacctcgcaccaagagtcgtgtactgaaaaccttcaataccggggccaaggcatccaacacatccggagctggcgagtctacgaataatgagcagaacgagcaggatagcagcctcgatctgaacctgccggaacccacgagcatcactgctccggagcagttcgacgaatgggtcaaggcccatcgcgtcgaagtcaaggttcccggtgaaatcgccgatttcacggtttccgactatggcgatggctcgcagcggcatgccatctgcggcgacgcggtcggccacgcttggaccgtggccgcatggggcgacgaaaggccggggcgtgccacggcacaagccattgccgtggccacggcaacatcagcggccatagtgccccttccaatcaccgataccctgcgagcacagcttgcgcggttcctgaaaagcgaacactcccgcaccatcgtgcatgggtataaagaattgctgcatcttttgggcgcggtcgatcttgacatggacctgccgatgttcgacaccaagcttgccgggtatctggcccaaccggatttccatgccgatagcctcaagcaggcggccgagcacttcctcgacatccacttcaccgaaaccgaacagccttcgcaaggcacgttggacttcgacgacgatcaggtcgaagaagatccgaacgaacatcgtctgcgtgatttggccattatccgcagcctcgccgtcacgctcgggccgattatcgacgagcgtgaacaatgctggctgatgcgcgcgattgaacttcctgtttcccgcgtgctgcacggcatggagcacacaggagccaaagtcgatagcgttcgactcgtctccatgcgtgaccagtttgccgccgaggctcgccaagcgcaggaaatggcttgggagtatgccggcaccgaaatcaacctgcaaagccccaagcagctgcagaaggtgctgttcgaagatatgggtttgaaacccaccaaacgcaccaagtccggctcatacaccacgaatgcggccgcattgcaggatctgtatgtcaaatcagtggacaatgagcgggccaacggtttcctcggagcgttgctgcgccatcgcgagatcaacaagctcaagcagatcgtccaaacgctgatcgatgccaccaacacatcagatgagcgcatccacaccactttcgagcaaaccgttgccgccaccggccgattgagctccgtggatccgaacctgcagaacatccccaatcggaacgccgccggccgtgagattcgtggcgtgttcgtgccgggggaggggtacgaggccctgatgagctgcgattactcacaggtcgagctgcgcattatggctgatctgtccgatgatgaggcgctgatcgaagcgttccgctccggagccgacttccacaaatacgtggcctcgatggtctacaagctgccggtcgaccagatcaccggcgaccagcgcagccacgtaaaagccatgagctacggattggcctatggtctgagcacgtatggtcttgcccagcaactcaagatcgcgccacgtgaagcggaagcgttgaaaaaccggtatttcgatacctttggcaaggtgcacgattaccttgaatcgctggtggccaatgcccgagagaaggggtatacggaaaccattttcggacgacgtcgctacttcccggccctgcattcgaccaatcgtgttgcgcgtgaggccgctgaacgtgcggcactcaacgcaccgattcagggatctgccgccgacatcatgaagattgcgatgattcgcgccgagcagaccttggccgaggctcacgtcaagagccgtatcattctgcagattcacgatgaactggtagtggaaatcgcgccgggagaaggcgaccaggtcaccgaactggtgcgcaacgccatggaacacgccgtcgaccttgccgtgccgctggacgtatcgtgcggcatcggttccgactggcaactcgctgcacactgacaatttctagctcccctcgggtgagggggctgagccgttgagcaaacagtccagtggattgtttgtaggtgaaggcgagccgatagtcgagtaatgaagagcacgagcatggcttgtccgcaattgcagaatgagtcccttgccgcaatagcccactacaatgggacatatgccgaatctcaagcaagtcatcgacgttctcgagaccctgtacccattgcgctacgccgaggaatgggatgagccgggcctcattgtcggcgatctgagccacgacgtgcaccgcatcgtgttcgccgccgacccgacctccgccatcattgacaaggctatcgctactggcgcggacctgctcatcacccatcacccgttgttcttccgttccgtacacgagacgagcggactcggtttccggggcgacatcgtccgcagactctaccagcacggctgcgggctgtgggtagggcacactaatgccgacgctgcgtatcgcggcgtgggacaggcggcggccgactacttcggactcatcgaccagaaaccactcgtgccgattgacgatgcaaacgcctctcatccggtcggcttggggcgtgtgggtcgtttgccgaagcctgttgccctgaaggatttcgctcagcgagtattcgacgaagtgtccgatcatggcatgaccagcgcgctcggcatccaggtatgcggcgattcggacacttttgttcagtatgtggccattctgcctggctccggggactccctgttcaacgaggtacgtgccaccggtgcggacgtgtacgtaaccagcgatttgcgtcaccacccggtgaccgacgccatcgaacaagcccggtatgaagcccgtatgaggtcccaaggcatcatgctcggccatggaatggcgggggagagccatgtgcgtccctgcttcatcaacacccctcatgccgccatcgaatccatgtggttcaactacgcgatcgatgacgtgccagccgccatcgaacaagcgaccggagcaaggcctgaagtcgagtggttccacgacacgaccgatccatggacgctgtccattaccgcgcatcgagattaagacgctatagtaacgtggcaaaaacgttttttccgaggagatgacatgtctggcggaagcaagcaggaacaactggagcatcggctcgaccataagctgaacgcctcctcggacggcatcgacatggacgtgcccgccaaagtgatcagtagcgaaaccgtttataccgggcgcatcttccacgtggacgacatgcgcatcgctctgaccgacaagcagggcaaggaacacgagatcggtcgccaggtgctgcgtcacgccccctgtgtggtcatgctcgtgcacgacatgtccaccgaccgttacctcatcgaacgcgaataccgtgccggatcggacatgttcgcctacgggcttcccgccggtctcatggacgagggcgaggacatcatggacgcggccctgagggaactggccgaggaaaccggcgtggtgccggaccgtgacaccatgggtgttgacttcgtgggcgatttctactcgtccgaaggcatgaccgacgaactggcccacatcatggtgttgcatttgggcccgttcaggcgggagcagcgccatttcgacgcggacgagcacgtggaatccgcgtggattccgtggagcgaccttgccgccacgcgcatcacctcatccaattcgatgatcgccatccagcatgaggcgttacgcagactcatcgccaggaactccgacaaagacaagccgtcgctgttctcctgacgttcaactccccggcacatcagtgacacaagaaagtgggatactgaaaactatgcagatcagacctggatcaatgtatccgctgggcgccagctatgacggcgccggtgtgaacttcgcgctgtactcacaggttgcgcagaaagtcgagctatgcctgttcgacgagcacgatgcggaaacgcgcatcgaaatgaccgaacagaactcatacgtatggcataactatatccccggcctccagcccggccaacgctacggctaccgcgtctacggtccctatgacccgatgcacggcctcagatgcaaccccaacaaactgctgcttgacccgtatgccaaggccattgaaggtaatatcgacggcgacgaaagcctgttctcatactggttcaagagcccggacgacaactcggcgatgaacgaccttgactcggccgcccacaccatgaagtcggccgtcatcaacccctacttcgattggggcaacgaccagcatccgtacatctcgtaccacgattcggtgatctacgaggcgcacgtgcgcggcatgaccaacctcaacatggacgtgccgccggacatccgcggcacctacgccggcctggcctatccgagcgtcatcgaatacctgaagaagctcggcatcaccgccatcgaactcatgccgatccaccagttcgtcaacgactccttcctgcaggagaagggcctgtcgaactactggggctacaacaccatcggcttcttcgcgccgcacaacgcctactcctcctccggggaacgcggcgagcaggtcaacgaattcaagtccatggtcaaggcctaccatcgcgccggcatggaagtcatcctcgacgtggtgtacaaccacaccgccgaaggcaaccatatgggccccaccctgagcttcaagggcatcgacaacgcctcctactaccgactggtggaaggcgaccagcagcactacttcgacaccaccggcactggcaactcgctgctcatgcgctcgccgcacgcgctgcagttgattaccgattcgctgcgctactgggttactgaaatgcacgtcgacggcttccgcttcgatctggccgccacgctggcacgccagttccaggaggtcgacaagctgtccgcgttcttcgacatcgtggagcaggacccgatcatctcgcgcgtcaagctcatcgccgaaccgtgggatctgggctccggcggctatcaggtgggcggcttcccgtccagctggtccgaatggaatggccgctaccgcgacaccgtgcgcgacttctggcgctcgcagccctccacgttgcccgaattcgcctcgcgcttgatgggcagctccgacctgtatcaggtcaacggccgtcgaccggtggcgtccgtgaactttatcaccgcgcatgacggtttcacgatgaacgacctggtcagctacaacgaaaagcacaacgaagccaatggcgagggcaatcgcgacggcgagagcaacaatcgctcttggaattgcggcgttgaaggcccgaccaatattccggacgtcaacgacttgcgtcagcgtcagatgcgcaacatgttcgccacgttgctgttcagccagggtatcccgatgatttgcggtggcgacgaagtggcccgcacccagcagggcaacaacaacgcctactgtcaggacaacgagatctcctggaccaactggcatcttgacaaaggacgcaaggaactgctcgccttcgtttccaaactcattcatctgcgtttggatcatccggtgttgcaccgccgtcgcttcttcaccggccgtgagcccggcgacgattcgaacacgattccgcaggtcgaatggttcgaccacaccggctcgatcatggatatggacgactggcagaacacgcatgcgttctccatgatgatctatctgaacggttcggatatcccggaggtcgactggtacggcaaccggatggtcgacaatgacttcatcctgatcttcaacgcgcattacgagccgattatgttcaccctgccggatgagcgatacggccgcaaatggcagctggtcgtggatacgcacaacccgaatgagccggcgctgagctatgaggcgggcttcatgatcaccgcccaatcccgcagcttcctcatgctcatgagcgccaaaaagcccaagaagcccatgggcctataaccagaccgaatttaagctccctctgacgagggagctcccggtgtagccgggtgagggagagaccgcagcaaagccgcgaactcctactcgcgccccttacgctcctccacgagccgagcatccccgaacgcaagtagatgctcgccggcaagcgggcgcggctggtcgagcagctcgcggaaatccaggattccatcgacttcatcgacgccaaacagcgcttctacgacgacgtcctgtctggcgcaaccccatacgtaagcgtgctcatcccatccgcggcgctcgcaaaggagtcagaggaaccgggagaattgaagggggtggagaggaaataggttcgaccgagctgtttcttcctccgggatacaagcgcgaacaacggtttgttgtacccgcgcttggcgaacgggacatgcccttagactggaatcagcaagcgcacagcgagacgcgcgaatcgttttccgatgtcgggaggtagtcatgtcgatcggtcaggttatcaaagtcgtgcgcgaggagcgaggtcttacgcagtcgcagttcgcgcacgagctgttcgtcacccaacaggcgctttcccgctgggagaagggaacggcagagccgagcatcgacatgattcggcttatcagcacccgttttgaggtgccgatggcgaggcttatggaaatgccggacaatggtttttgccaaagttgtgccatgccgttttaccgcccggaagatcacggcaccgaaccggatggaacgcgaaacggagattattgcaactactgctatgaagacggcgtttttcttcaggcctatgccaatagcgatgaattggtcgccgcgtgtgcgccgatgatggcggaatcctgccatatcagcgtcgaacaggccgaggactgcatgtcggcgctgttgccaaacctcaagcggtggcggcgtcaggatgagatcgatgcggtggcggaggggaaatgagcgatggcattcgactataaaaaggaatataaggacctgtatcagccgaagaggatgcccgccatcgtcacggtgccggcgatgcggttcgtcgcggtggacggtgtaggagatccgaacgaagaaggcggcgactacgccaaggcgatgcaactgctgtacggcatttcgttcaccatcaaaatgaacaagaagtcaaataatccggacgagcacattgacgggtacttcgactacaccgtgcctccgctggagggcttatggagcatggagaaaggtgtgcccggcgtcgattacacgcgtaaaaccgacttctattggacttcgatgattcgtctgccggaattcgtgaccgatgaggtctttgcgtgggccaaggcatcgtttgcctccaagcatcccgaagtcgacatcaatcgtgcatatctcttcgacttcgatgaaggcgtggtcgcgcaggtcatgcacaaaggcccgtacgacgacgagcccgcaaccgtgacgattctggacggctacgcgcgttcgcaaggctacgggctcgacttctccgacgcccgccgccatcacgagatctacctatccgacccgcgccgagccaaaccggaaaatctcaaaaccatcatccgtcatccggtagtgaaggtgggttgactttcggcgaactgctcgaagcgctcaccgcgcagtagcgtgaacaatctgccggaatccttaccggggtcaaagagcgctaccaagaactcgataagcaaaataactagaagcacgggttcctctcggagagattctgcccgagcgaccttataaatccttgcgcgggtcacctttccctgtgcaggaagcatccaggctcatgtgcattgatgacgccgatggattgcagataggcgtagacgatggtggtgccgatgaatcgcatgccgtacgtcttgagatccactgcgatggcgtcggacagaggggatgtagtcatgcctgtctcgtagatgacgtgacggccggtgaaccgccaaatatagtcgtcgaaactgccgtacgacgtctggatatcccggaatgcgttggcattaccgaccgtcgcgacgattttgcgacggttgcggatgatgcccggatcgttcatgagttcggcgatcttgttctcgtcatagcgccggatccgttcgatgtcgaacccatcgaacgcctgacggaaacgcttgcgtttgttcagtatcgtctcccatgacagtccggcttggaaggtctcgagcaccagcatctcaaagaggtggtggtcatcatgcgacggaaccgcccattcggcatcgtgataggcaacatagacgggattgctgagatttcaccagccgcagcgtggtcttatatcgtccatgtgctctccctatgggtcgttggagacggtcggttctagatgttgattcgatgtgtgatccagtataaacggtgtgttcggatagcggtctggatgtgcggattgtctgaaccatatttgccggattgcaggtataaaggggttagttactgcggttgcgggtatttcggtactagttaggggtgattctgggctgtaactcgacaccttttacctgcaacccactcccgcccacgggattgcacaatcggttgcaggtattttggtgtcatttgagattgggaagcggaaatcgatgtcgcatggaatcgaactgactagcaggtggggtcccaacatcacaaaagtcccttagaccgcaaggccatataggttctacggtcatcggataaaaccggataaatcgtttagcggtcggataaaagaagaagcccagaatcgttgagattccaggcttttttgtttgtcgggctagcgggatttgaacccacgacatcctgctcccaaagcaggcgcgctaccaaactgcgctatagcccgatgcgtcattaaggcacaatgaatcattataaacgacgctggatacattgcgtgtcgagcatatgaattcaaaaaaggttctggattctcttgatagcttatgagtgacatctttattcattgatgctctacaacgactaggtttggatctgcatcgatatccggcgcatccgctggactaacaaggaccgtgcaaacgatgtggcccccgacttcctgcgaggaagtcgggggccacatcgtttgcacggtggactatcggatcaattctgatcagatcagctcgaggtcgacatcgaggctgatcggcttgtccgccgggatatggtactgggggtgcaccggcgacatccaggaatcatcgccgccaacgcccatctgtgcggcaaggacgcgcaggaacatgtgcttcggcttcggcagctcgtcctggtgctgagcctcctcaagcatgaagctggagtacggcaacaggcttaccgcgaacggcgcggcaccatcggcgcggctgacgcgcatgccgtggccgtgatcgtcggtaatctcggcccaacgcacatcctcatggttgcccgtctcctgcggcatgaggtacggcgcatgatccgcgaaagcgttggtgctccacacgccgagcttggcgtgtttgcggtccaggtacgtctccgccgggccggtgccgaagaacctcaggttcgtgtactgcacaggcagcgtccattcgatgccgaacgccgggatggtgggcaggtcaccctgctctccagggtattcgacgtgcaggttcacgcggccatcggtgtgggccgtgtaggagacggtcaccttggtgcgctgcgcggtggcgagctcatacgtgtacgtgcccttgagcgtgctgtcgtcgatctgctcgagcacgttgtccacgcagcgggcgtagcggccggcgcccagccactggacgcgctcgaaaccgtgaccggcgccgcgatcgttgtcggtcagcggacggaaggtggtgattgcgggacggcgcagcacgaactcgttgtcggcgaaggtataggagaccatgccgccctgggtgcgcgacagcaggacctcgcgtccggcgcctcgcacgccggcgttccaacggcccacggtgatggtcccatcggccggcttcgtgtcgggcgtcgcggtggcgtccgcgggcaccacggtctgtccgaaggcgagctcgtagccgctttcggcccaatcggtcgccttggcgagacgctgcgaaacctgcagcaccagttcgcgggcgtcggcgcggtacgccgccaccggccatgcgacatcgaacgtgcgggtctcaccggcgggcacgtcgaaacgccgggtggactgccagaccggcttgccgtcggcgagaacgctcaggacgaacacgtagtcgccggtggcggtgaacaggttgtcgttcttgacggacaccgagtccttcgtcacgtcgatgtggacgttcgagtacagctgcttgacttcctgggccttgggggaaggcttgcggtcggcgaacagcaggccgtcgccggagaactcgtagtcggacggacggtcgccgaagtctccgccgtagcgcaggctcctggtgccgtcgggctgggtggcgtagatggcctggtcgatgaagtcccagatgaagccgccctgatacttcgggtagcgttcgagcgccgtgtattcgtccatgttgcccacggagttgcccatggcgtgcatgtattcgcaggagaggtacggcttcttcgggtcgtccttcaggtacttctcgatctcgtcggcatgcgagtacatacgggtctcgatgtcggtgacgtcatcgtagtcacggttgtgggtcacgccctcgtagtgcaccggacggttcgggtcgatgtcgtgcacgtgcttgtacatggcgcggaacacgtcgcccacgtaggattcgttgcccagtgaccagatcagcacgctcgggtggttgtagtcgcgacgcatcatgctgttgacgcggtcgacgcaggcgccttcccattcgcgcttgctacccggcacgatggtgtcctcggtgaggacgtctccgggcagggaccagctgccgtgggcttcgaggttggcttcgtcgatcaggtagatgccgtactcgtcgcacagttcgtaccagcgttcctggttcgggtagtgcgaggtgcggatggagttgatgttgtggcgcttgcagaagaccacgtcatcgatcatgtcctgctcggtgatggcgcggccccgttcggcgtcgaactcgtggcggtcggcgcccttgaacacgatgcgcttgccgttgatggtcaggatgccgtcctcgatgcggaagcggcggaaaccgaccttctgggacgtgcattcgatgacgtcgcccgcctggtcgatgacgtcgacgtcaagctcgtacagcgtcgggctttcggcgctccaaggggcgatgccctgcagcggcccgctggagatcgcggtctgcgcctccgcgtcgcccgtcgtctgccacaccgtgttgccgtcggcgtccttcagggtcgcgcggaccgtggccgcgtcggccgcgttgagcacggtcagcgcggcatcgagggaggcggtgccggcctcgggatcccaatcggcttcgatctgcgtgttctcgatgtgcacatgcgggcgggcggcgagtttgacggagcggaacaggccgtgcagacgccagaagtcctgatcctcaagccaggaggcgctggagtattcgtagcaggcgacggccacgacgttctccccgtcgtgcagcagttcggtgatgtcgaactcattgggcgtgaagccgtcctcgccatagccgacgaacgcgccgttgacccacacgtagatcgccgtggccatgccgtggaacacgatcgacaccgatccgccggcctgcttggcgtttgccacgggggcggagacggtgaacttcctgcggtagagcgcgacgtgattgttctccgggatgttcggttccaacgggttctcgtggccgtcccacggatactggacgttcacgtacttgtggttcatcagaccggccgtctgcaggtggcccggaacctggatacgctcgaacgaggagtcgtcgaacgactcggccgtcgcgggttcctcttcgaggttgatgtcggcggcctgaacgacctcgacccgccactcgccgtcaaggctctgcttgagatcggaccattgtccgctctgggggtcgcgggcgtaccacttgtggctggaatgggccggagtccggttcacctcgaacaccgtcgggtcggtcagccaagcctgcgatgcgcgatcgacatgtgtgacgtctgtcatgctctcctgctttctgtcattacctcgttgtgaatgatattatggaagaggccggggcctcctttaccgaaaaggataaacagtttttatataaaacgcaaatcctgtttaccgcttccaaatcactggcactgcttgccgtcgacgctacgccgcgtccatgcaatgtctcggtttagctcatgttatcccatccttgcgacacgctgtttatctccgtttactaatgttttttactttcggtgataaaactggtatgcttactttataaaatcaatggatggttccagctctggattcttaaggaggagactaatgagcaacgaaaatgccgcggtcggcgacgtccgcaggaagggcgggctcggccagcgcatcgcctacgcgtgcggcaacttggggcaggctgccttctacaacgcaatgagcacgtacttcgtcacgtacgtcaccagctgcctgttcgtcagctacagcaaggctctcgccgcccaaatgatcgccgtcatcaccggcctgatcgtcgttatccgcatcgccgagatcttcatcgatccgctgctgggcaacctcgtggataacaccaccaccaagtggggccgtttccgcccgtggcagttcatcggcggactggtctcctccgtgttgatcatgctcatcttctccggcatgttcggactggtcaacgtgaacaccacgctgttcatcgtgctgttcgtcatcacgttcatcgtgcttgacgtgttctactccctgcgtgacatctcctactggggcatgatcccggcgttgtcctccgactcccacgaacgttccacctacaccgcccttggcaccttcaccggctctatcggctacaacggcatcaccgtcatcgtcatcccgatcgtcagctacttcacctggacgttcaccggcgccaagggccagggacaggccggatggacctccttcggcttcatcgtcgcgctcctcggcctgattaccgcctggaccgtcgcctttggcaccaaggaaagcaccagcgcgctgcgtgccaaggcccagaagaacggcaacccgttcgaggcgttcaaggcgctgttccagaacgaccagctgctgtgggtcgccctgtcctacctgctgtacgccatcgcaaacgtcatcacgaccggtgtgatgtactacctcttcgtgttcgtgcttgacgagcctgccgccttctccatcaccggcatcatcccgctgatcgccggattcatcatggcgccgctgtacccgattctcaaccgctggattccccgtcgctacctgttcaccggcggcatggtctccatgatcatcggctacacgatgctcgccctgttctccagcaacctgccggtcgtcatcgtcgccctgatcttcttctatgtgcctgcgcagttcatccagatgaccgcgattctgtcgctgaccgactccatcgagtacggccagctgaagaacggcaagcgcaacgaggcggtcaccttgtcggtgcgtcccatgctcgacaagatcggcggcgcgatgtccaacggtgcggtcggtgccgttgccctcgcggctggcatgaccggtcatgccacggcagccgacatgaccgcgtccaacatcgccacgttcaagaccttcgccttctacgtcccgcttgttctcatcatcctcagcctcgtcgtgttctggttcaaggtcaagatcgatgagaagatgcatgcgcagatcgttgaggagctcgaagccaagctcgcttccggcgagatcgtcgacgatgaggcgcaggcagttattaagaactgatctcccgttcccatccctcccataaggcccgtccgcctgaaccgcaagatgcggtccgtggcggacgggcctgttcgttcctgcggtcggcggtcatgaacatacccatgtcggttccggcagtggggccggaaccggcggcgtgtcgactatcggccaggagtgtctatcagctagtatcagctggtatccgatatgggccgtggccctgcgccgcctgccaaaggagataaccgtgcgtgcatgacgtgacttcgtatggccaaaactgctgaccgtggacggacgcggcatcgctttcggtggcgactatagtcccgaccaatggccggaggaaatctgggatgacgacatccgcctgatgggccaggccggcgtcaacaccgtggcccttgccatcttcagctgagatcgcctccagcccatcgaagaccattgggatttcgactggctcgatcgcgtcatcgacaagctcggtgacgtgaccgtcgccggaccgcatgtgcaggtgcttgcctcgtatgccggcgaagaagtggatgagtgggagcttgacggcatggccgcgatcacccgcaacacgtacggcgaaggggaggcgtatttcctcggctgcgatctgggcgtgagcgatctgacgcgattcgtgggaggctggcttgccgcgcagccgcaggatggccggcagccggaagccaacctgcggtcgcccgccagcggcgtgacctctgacgttctgcacaccgtgcgtcaatccgacgacgccatattcgacttctatctgacacgtggcagatcggatgtcgaactgcgcgacatcgcaggggagccgatcgtcctgttccgggcggaacggggcagtgacggcggcgcgtatacggtgcatcgcaatggcgttttcgtgacgaagcgcccgaacccgtcggtgtagtcagttgcgacgaaacaggagggcggagccgcggacggttttgtgagacggtccgcggcctcaccgttggaagccgcggactcggatcatcagcaacggacgcgtcgttgatttccacttccggagcaacgatggtgagctttgccgtgacgagatgctgcaggacggtgccgacgtacatggtgcccggattctcccttcgccgctgcgctgcctgccgcagcagatgttccacggccgcatcaacggaaagcgagttgtcggactccagcttgaatggtttgctggtgaagaacgcctgaattcgtttgacccagtattgctcgatctcggtgaattgctctgctgtcggacgtaattcattgatgagctcggcatagtcatgcatcagcgccatggtgccgcggctggttcgtcccttaaaggttgaaccgatagaaccgtcattcattactttttcaacgataccgacacgctcattcgattgtgtccaatactgctttctttctgcatgaacaacggtactcggcaaggcggtaacgatagtcgcaaaggctaagaagcccgtacataatcgtttttttgtagtgtttcagattttcagtagaatggcgacagccaaatcccgctggcttgctagtaaagcgttgtcctcgggggaagttttgtttgttgttgaaagataacgcggcatcgaatagataggggaggcccggcatgggacgtcatcagcgtgcagaaacctccggactcatctccttcttgatttgcgccgtcgttggcgcggtatcgatgaacctgtacatggaatacgcgccggccatctggcagctgacgcaacgccgattcatggtatgttcgggcatcgtggcggcatgcggcgtcatttccttcattattggctatgcgcgcaaatcacgttcattgaacctcaaacatggttggtttgcaccgattcgtcgcattttcgaaatcgtcgccctttcggtggtgtatgcctcgaccattttcctgtcgtcttttgcactcatcggtgcggccaacgacatgatgggcaatgccatcttctccggctatatctccagcgtctgcgccgccttcgccggcgtggtggggtacatgacctttgtacaggcggagatgatgaacgccaaaactattgccagtctgttgccgttcttcgtcatctccggcgtggtcaccgccggcatgaccaccgacgacccatactggtatcacaacaacttttcgcagctcggcgacagaaccacgtttgcggcccgtatgttcaactccacgctgattcttgccggcacatgcatcatcatcgtcagctacttcgccatctccgaactggtgaccaccgaacggctacagcgcctctggcacgaccgcaccaacagagatccgaatcgcggctacgaaatcccacatttcatgctgcgcatctccattctgtccttcctgctgatggtggccggcctggcattcatcggcatcggcgtgtttcggtacacgccacacaatctcttgcacaatatatgcgccaaaggcctgccgttcgtcatgctgctgctgttcgtgctcctgccgtggcttgcgccacgcctgtccaaagcagtgatggtggcctccgacctgaccgcgctcgtatgcgctgcattctgggtcaatatgatgatgggtcacaacaccctcaccaatgtggaggcgttggctggtctggcgttcctcggctggttcatcgtgttctcgcgccagatcgccgccatcgaggccgatcgcgcggccgctcagttgttgcacgcgcaggccatcgaaggcggttttgagcagccgtcttccgcacctgatcagcagatcgaatcccgcatcgctgccgaccggtgaataatttgtttgatagatttggccttatgactgaacgactcacgaatctctggcctgccccgctcgccgcacagccgttgaacgctacggtaacggtgccgggcagcaagtccctatccaaccgctacctgattctcgccgccctcggcagcaagcccgttactctgattggcctgctgcgttcgcgcgacacggaccttatgatgggcgcactcgaagccctcggtgtccgctgcgacgtggattccgcaaccgacaccaccgtaacggttactcctcctgtatccggccgattccatggcaacgtcaatgtgttctgcggactggccggcacggtgatgcgtttcgtgcccggccttgccctgtttgcagatggcccagtgaattttgatggcgacgaacaggcttatgcacgtccgatgaagccggtgcttgacggtttggaacagctgggtgcaacggttgattaccacggcgaggttggccgtctgccgttcactattacgccgcctgcaaccttgccggctgcccaggcgcaggtcagcatcgattcgtccggttcttcccagttcatctccggcctgttgctgattagttccaaactgcctggcggtctgcacctcgcgcacacgggggagaagaccccgagcctgccgcacattcgcatgaccgtggccgatgtgaccggtgccggcggtgcggttgaggccgacgaatccgcccgcacatggacggttgaaccgcgcgcaatgcaactgtcgagcaaggtgaccgttgagcccgatctgtcgaacgcggcgccattcctcggcgcggcattgatcgccggcggcacggtccgggtgcctcattggcctgaaaccaccacccagccgggcggcctgttgcccggatatctggagcagatgggtgccgaagtatcgttcccgaccatcggcggcgtgcgctattgcgaggtgaccggtgacggcaccgtgcgtgggctgggtacgttcgatttgacggcggccggggagattgcgccctcgttggcggcgattctggtgtttgctgataaatcgacagacatggttggtattggtcacctgcgcggccacgaaacgaatcgtctggaggcattggtcaacgagattcgtcgtgttgggggagcggctgaggaattgcctgatggattgcgtatcgaaccggtgccggcggagacgttgcacggtgccgtgatggaaacctatgctgatcaccgtatggccacgttcgccgcgatgctggggctgcgtattcccgatatcgaggtcatcaacgtggccaccacgcgcaagaccttgcctgatttcgtcggtatgtggagtggcatgctgaggcagtaaggggtcctgtgttctggtggaactcccctcagtccgctacgcggacagctcccctcagagaagggagccaagttatagggcctggatcccctctctgagtggatctgtccaccggaggcgactgaggggagtatgacgcgggggtagtggtctcatgaccatatacgaatgggggctgattccaatcggaatcagcccccatagtgttgcaactagagattggtgagatgcctaacggcggttacttacttggcgaaggtgttgccgtaggtgtcggtgccggcttcggcgattgcggcggacttgcgggcgatggccagctcttcgttcgtcgggatcacggcgatgatcacggaggagtccggagtggagatgatgcgcggttccttggagcgggtggcgttcttctcctcgtccagcttgacgccgaacggagcgagcttgtcgcacaccatcttgcggaccacgtcgtcgttctcgcccacgccagcggtgaaggtgatcacgtcgcagccacccatctggtaggtgtagttgccgatgtagctgacgatgcggtgcacgtagacatccagagccagcttggcgtcctcattgccctcggacaccagacggtgaacctcacgcaaatcgccatagccggtcatgcccatcatgccggaacgcttgttgaacagggcgtcaagctcgtccacgttcatgtgggcgttgcgaatcaggtggaagaccacagccgggtcgatgtcaccggtacggccacccatcatcaggccctcaagcggggtcagacccatggaggtctcaaccggcttgccggagacctcagcggaagcggaagcgccgttgccgatgtgcaaaacgatctgcttcaggccttcagccggcttgccgacgacgtccggcaccacggaggagatgtactcgtgggaggtgccgtgggcgccgtagcggcggatgtggtactgatcggcgatttccttgttcagcgcgtaggtgctggcggccttcggcagctggaagaagaaggaggaatcgaagacgaagatctgcggaacgtccggcagcagggagcgcatgacttcggcgcccttggcctccgggccgttgtgcagcggggcgagcacagccagatccttgacctggttgatggtcttgttggtcacgagggccggcttcgggaagatggagccaccctgcaccacacggtggccgacggcgacaatgccagcctcagacaggttcgggccgtactcctcgaagaagccgagcacgcgcttcagaccctgctcgtggtcgtgaatcggctcttcaagctcgtgcttttcgccgttgtactcgtgcttgtagtggccgtcgaccggctcaccgatcttctcgacgaggccggaagcgaggccttcgccggattcgagatcaaccagctggtacttgatcgagctggagccggaattgatgacaaggacggttttcgccattgtgggcatcctccattgtgattgaatgttcccgtgagacacgggttaccgttgattagattactcgttgcttgctacaaaataagcattacggtggctcccgctggcgggagccaccgggagccaagccgggctcactgcgcttcgatggcggtgagggcgatggtgttgatgatgtcctgcaccagagcaccacgggacaggtcgtttaccggcttgttgagaccctgcagcaccgggccgatggccaaggcgccggaggagcgctgcacggctttgtagccgatgttgccggcgcacaggtccgggaagacgaacacgttgacgtgtccggccacatcgttgcccttggccttggtggcggccacggtgggggaccaggcggcgtcgaactggatggaaccgaccaccggcagatccggagccttctccttgagcagcttggtggcttcctcgaccatgtccacgtccggtcccttgccggagccgagggtggagtaggagagcataccgaccttcgggtcgatgccgaaggcacgtgcggtctcggcggactgcaacgcgatttcggaaagctgctcggcatccgggttgaggttgatggcgcagtcggagaacacggccacatggtccttgaagcacatgagaaatgcgccggagaccagcttctggccgggcttggtcttgatgacctgcagggccgggcgcacggtgttggcggtggagttcacggagccggagaccaggccgtcggcgtagccgagcaccacgagcatggtgccgaagtagctggcgtcggccagctgcttgcgggcctgctcctcggtcatgcccttcttggcacgcaactcgcacagcttggcgaccatgggcttcaacacgttctcgtcgtccatagcctggaagcgggcgcgctccaagtagttcaggcccagttccttgccgcgagccagaatggcgtccttgttgcccacgatgatgaggttcacgatctcgcgctcaagcaggtagtcggccgccttgatgatgcggtcctcctcgccttcgggcagcacgatggtcttcttgttgctcttggccttgccgagcaggccgaactggaaggcgtacggggtgatgggcgcggtgacgtccacatcgagcgcggcgagcacttcatcggtgggagcgttcttacggaaggtctccagcgccagatccttggtggattcatcggtgaacggcacctgcggcagagtccagaccggcaggccgtacttggcgagggtctccttaacggagaaagcgtggcgcggctcgcatccggtcacgaagatgccgagcaccttgttgccagcggcctccatgccctcgatggacagcttgacggtctcgtcgagctcgtgcggccaacggtcgatggtgcacacggctaggaacacgccggccttcagatcagcggcgacattcgcgtcgaattcatagctggtcggatcgttgacgtgggacttgtcggtgcccacgatcagggcggcgtccgcgcgggaaacgtccatggcatcgttgaacgcgccgacgatatcgccacgggcggtgtccttatcctcgcgcaccttgtgcacatcgaggccggtggacagggccacgccgagtccggcattggaggcggcgagcaggatcggggtgaattcgtcatggttggacacagcagggcggaacaccatggtcttgtacttggaagtcaatgcgttgagcatgccgtaagcgacgacgttgcggccattggcgccttcagggctggcgatatatacacgggtgacggtcacgatgtttttgtctcctttgatgatcaacacgatagggaccacacctcattgtagtggcgattactgttatcgctcacgccggtgtcgcgccaatcggagagcgtcccctttgcgacgctttccggggaatgttgcgcaaaaccccaaaagtcggccgataggccagaaaacgaaaaaggccggtgcgtgaagcaccggcctcgattgtggagctagggggattcgaacccccgaccctctccatgccatggagatgcgctaccagctgcgctatagccccgagtgaagctatccgattcatgggagtcgcaagacccgccatgaaccagcggagaaaccaccatatcacccgatttgatggcttcgtcgtggagctagggggattcgaacccccgaccctctccatgccatggagatgcgctaccagctgcgctatagccccgttttcaattgttggcccgttgtttggacctcgtatacattacgacgagatgtcgattctggcaaaagccggcgtgtcgccaaatggcaaaagtgtgatttggcgacactttttggcttgtttccgccattattcaggcattgagtcattcagttattgcttgaacggttccgaatgcaccggacctattggattagcaggggagtcgggaacatgatcagcgttcgcgttcccattcgtcggtgtcggcgatggccggaccgtgattgtagtccagcagacgccagcgcacagtgccatcgggattgtccatcggcaccaagcgcacccagtgcgcattacgcaatgaaaccaccgtggaaaaggtcggatcgattgcagaaatgcccaacagggtctgcaatgtctgcgcaatccatgcgccgtgcgagaacacgaacaggtccgtgtcgtctccggcacgcgtggaccagtcctcaagagcctccacgccgcgcttgcccacagcttccttgggctcggctccatacttcagctcgccgccccgagactccatccaggaacggaagtcctcggggtagcgttcggccagttcggccacggcatggccatcccaatcaccgaagctgcgttcacggacgcgacgatcatcgacgggctcgattccacccaatacgtcggcgaaagcttgcgcggtggcgtgcgcacgcttcaaatcggagcagacaatgaaccggtggttgatttccggccgacgatcgacgtacaggcttttcaaggccgcggcggtctgcttgacctgccattcacccacggcgtccagcggaatgtcgacctggccttggagcttgtgagcggcgttgtaggaggtgcgtccatgacggataaggaaaacggaacgaacatgattggtcatagtgacgatcctttcggttccagtgaggaaacaggaaaaaggggagggctgcctgatgccgtcaatgatgtttggcaacaggcagcccgacacgcgaatatcagcgaatatcagcgaatatcagcgaatatcagcgaatatcagcgttatgtgattcgcacgttacgcggtggtgacggcagcagcgtccgcatgctccgccgtttccgggtgtgcgagttcaagatcgatggccgggcagtcgcgccagagtcgttcgagcccgtagaattcgcgcgattcctcgtgcatgacatgaatcacgaaatcaccgtagtcaagcagcacccactggccctcggtcaggccctcgcgagagcgcggctgacggccggagcacttaaggaacaggtccttttcgatttcctcggccacggccagtacctgacgctcgttggaggcgccggcgatcatcatgatgtcggtgatgccgagcaggtcggctacgtcgaaggccacgatgtcggtggccttgatacggtctgcggcctcggcggccacgcggacggcgttgatggaatcctgaagtgcgggcatggttcagcgctcccaggcgggcttccagccctcgacgttgtgctgcgtgttctcggagtagaccatcgtgtcgctcggcacggcgtggcgcaccacggagccggcgccggtggtcacgttgtcgccgacctcgaccggggccacgaacaggttgccggcgcccacatggcagccggagccgatggtggtacggttcttgtgcacaccgtcatagttggcggtgatggtgccgccgccgatgttggtgtggtcgccgagctgggcgtcgcccacgtagctcaggtgcggcaccttggtgccgttgccgatgtgcgccttcttcatttcgacgaacgcgccggccttggcatcctcgccgaactcgttgcccgggcgcaggtaggtccacgggccgatgttcgtgcgtgcgccgatgtgcgattcctgcacgcgggaacgctcgaccacggcaccttcgtccacggttgcgtcaatgagggtggtgtacgggccgacgatggcgtcctcgccgaccaccgtgtggccttgcaggaaggagccgggcaggatggtggcgtcgcggccgatctggacatcgtcctcgatccaagtggtttccgggtcaagaatggtcacgccgtcgcgcatccagcgctcgcagacgcggcggttgtaggtcttggacagcgcggccagctgcacgcggtcgttcacgccttcgacggtgagcggatccggagcggcgaacgcgccgaccttgccagcggccttggcggtttccagcgcgtcggtcagatagaactcaccctgcgcgttgttcgacttcagtccggcgattgcctcggtaagcacggaagcctcgaacacgtagaccgaggtgttcacttcctgcacggcgagttcgctgcggttggcgtccttctgctcgacgatgcgcagcacgttgccttcgcgatcgcggatgatgcggccgtagccggtcgggtcatcgaggatggtggtgagcacggtggcgccgttgccggaggcggtgtggaattcgaccaggcggtgcagcgtctcgctgtcgagcagcggcatgtcggaggcggcgatcagcaccgggccatcgaccttgccagcctcggtgagctgtgccattgcgcactgcacggcgcgaccggtaccgggaatgtcgtcctggttcacgatggtgacctgctcgtcataggagcgggcggcttcggcgacgcgctcggcctggaagtgcacgaccacggccagcgtgtcggggttcagggcggtcaccgaatccatgaccctgttcaggaaggtcttgcctgcaaaagtatgcagcaccttcggcttgttggaacgcatgcgggtaccctcgccggcggcgaggacgatggctgcggataatgccataactgacgtattcccttcgatcggaatgtctattgagggtggaaacacctcaaaacaatagacggccgcccggatgtcgagcggccgtcagccgttcccccacctggactcgaaccaagacaaagggttccaaagacccgtgtgctgccattacaccatgggggagtcgtgggctttcggcccacaagtgttcatttataccatactgtcggtatttaccgaaagactacgccatgtcgcgtctcgcatcgtgtgctttccacgaacaaacacgcacgtgatcaggcgaacaggaagccttgaccgtggtgctcggggtaggtgtcgaacagttcggcgaccgagccgtcctcgaatacggcgcggatggcgctggccagcagcggggcgatcgacaggacggtcaagccatcccagcgcttttcctcgggaatcggcacggtgtcggtcagcacgacctcgcgcgcaccgcagttcttgagccgctcgatggccgggccggagagcacgccatgcgtggcgaccacggtcaccgacttggctcccgcgtcctgcagcacgtggcatgcgcccgcgatggtaccggcggtgtcgatcaggtcatcgacaagcacgcagtccttgccggcgacgtcgccgaccacacggttggcgaccgcctggttcgggcgggtgatgtcgcgagtcttgtgcacgaaagcgagcggaccgccgccgagacgctgcgcccactgctcggccacgcgaatgcggccggcgtcgggggagacgacggcgacgttgtcgagatggccttggaaacgatcacggatgtagtcgaccagcaccggcatggccaccagatgatcgaccgggccgtcgaagaagccttgggactgcgcggcatgcagatcgaccgacatgatgcggtcggcaccggcggtcttcagcaggtcgaacaccagacggcaggagatgggctcgcggccgcggtgcttcttgtcctgacgggagtagccgagcaacgggcagaccgcagtaatggaacgggccgaggcgcgcttcaatgcgtcgatcatgatgagctgctccatgatcgccttgttgatgggtttgtagtggctttgcagcacgaacacatcggcgccacgcaccgattcggtgtagcgcacgtacatctcgccgttggcgaaatcgtatgcggtggtttcaaggacgtcgatgccgagctgctcggcgacatcctcagccaacttcggatgaatccttcccgtaacgagaataagattcttatcgggcttcccttcaaggattgcgctcaccatgtctcccaacgtgtggtctcgttgatgcagtcttcagcatagccgttcttcacgactggttggacaactcagcgttgcctgccgttcacctgccgcttgcgatccattgttcgatggcctgtttgaccgcctttgcatagatatcgctatccatgctcgggtggatgccgtcggagccgagcacctgcgcgttcgcgttggctgtggcatcccaatccaccagcaccacattgtccggatgtgcggccgcatagtcggcaagcacctggttggtaggtggaatccacgtacggtctccgtgggcattgaccagtaccagcacgcggtcggggccgatcatattacgaatctggtccaactgatcaggggtgattgccgaattggtgccaaggccgatcaacacccactgctgcagactgccggcggacagagcgttgccgatgagttcgggggcgaccatgatggagcgggaaacgctcgcgtcggtctgaatgccggggaagacttccgaaaggccctgtgatgaggccagcatcaccgaatcgcctatggcggtaatctgatcgccggtgggcatctcatgcttgggcttgggcggtgccggcacggcatggcgcagcagcacgtgttcggttttctgcatacgttccagttgtgcggcctgttgctccagctggatctgcatggcggttttcgcaggtgcatgagcaatgccctgcacgcagccggccaacgacagcaccaggataacgtcaacggcaataacccgggccacatgattcttcttgttcgtgcgaaggggcaccacgacggataccgccgagtgcgttgccgccggtttctccaccatcagccaggaaatcatcaccgcaatggcggtgagcaacgcggtcatgatgagaggccaaggccctactgccttgaagatcttcggggcaagggcgctggaaagaatccacaacggccagtgccacaggtagatgccgtacgaatacttgccgagggaggccaatggcttgaacaccatgaggctttgcatccaggaatcgtcggagatggtaccggcaatcagcagcacggacaacaagctggacaatatgatgccaccgcggaaggcgaatgcatcctgtttgccgataaccgccatggtgaccaaggcaatcaggctgaggaacgccaataccggtgctgccgcattccagatgcgatgctccacgggaatctgaggtaacggagcccgatgtgcggctgccgaagcgctcgagctaatggtgcggggcatcggcacagccctctggcgagcgtggcccaactgaggagcggtgacccaccaggcgagagccacacccagcatcaggcccatgctgtgggtatcggtgccgaagtagacgcgggtggggtcgcctttgggcacatacatcacccacatggcgatactgctgaacgccgcgagtcccagtgggatgagtgaagacagtttcgtctggcggagcttccacatcagccagacgatgaacggcacgatgacgtagaactgcatgagcacgccaatgaaccacagatggcgaaacacctgcgggttcatttggtcgaaatagctttggcctccggcaatggcgtaccagttgtagcagcccagcagcacggtgatgacttggtcgcggatggaaactagaatgtcgtgatcgaacagccagccgacggagacgatgaccggaatcagcagaaacagcgccggatagagacgtactgcacgcttgggaatatatcgcacgagattcagcgatccggtttccgccagagaacgaatcaaactgacggcaatcaggaatccagagacggtgaagaacacgtcgactccgtagaatccgcctggcagccgttgctgcatgcagtggtacagcacaatggctatcagcgccagtcctttaataccgtctaaacccacgaaccgcttcacggataatccttctctctccgtagtgccgatggcattccccgttctctccaacaaacggaaaacaagcccagcatggccgaggggagagacaatgcgacagcagcgaatcgtcaggccgcatgctgcatgattaccggcttgacgattcgcggcataccgcgcttatcggtggcgcttaccggtgatacagactcacccgttcgtacttcggttcgcagcacacgttgatgccgagtttgcgatacagcgcctcgtccgtggatgagatgataacggagaagaaggcgtcgcagccctgcaactgtttgagcccgtcgatgacgcgagcggccacaggactggtggcgctggtgattgacaatgcaatcagcgtctcatccgagtgcaagcgtcggttcacgctgttgagatgttcggttttcagccgacagatgggttcgatggcggcatcgtcgattaccggaatggtttcgtcaacaccggtgacggccttgagcgcgtgcatcagcagcgcgctggccgcgcccaacaggtcgccggttttgccggtgaccacatggccatcgggcagcaccatggcgccagccggggcaccggtggcggcctccttctcaagagccacggcgcgggcgggagaaagatcgggggtcacgccggcccggttcatgatggagcgcagccgctccacctgttcctcgccagtgccggtgcgcttcaagtgcacggcggcggcgaagtagcggcgcacgatttccagacgcgcggcatcgcggcaggcatcgtcgtccacaatggcgtatccggccatgttgacgcccatatcggtggggctctgataggggctttcgcccatgatgcgctccatcatggccttgagcacggggaatgcttcgacgtcgcggttgtagttgacggtggtctcgccgtacgcctccagatggaaggggtcgatgatattggcatcgtcgaggtcgacggtggcagcctcgtacgcgatgttgaccggatggttgagcggaagattccagatggggaacgtctcgtatttggcatagccggcgtcgatgccgcgctggtgctcgtggtacagctgagacaggcacgtggcgagtttgccggagcccgggccgggcgcggtgaccacgacgagcggtcggctggtctcgatgtactcgttcctgccgtagccgtcatcggacacgatgcgttcgatgtcgtgcgggtatccggcgatcgggtagtgcaggcggcaggtgacgccgagttgctcgaggcggtggcggtaggcgtcggcggcgggctgattggcgtattgggtgagcactacggagccgacgaggaagccgcgggaacggaacacgtcgatgagtcgcagtacgtcttcgtcatacgggatgccgagatcgccgcgggtcttgcctttttcgatatggttggcgttgatggcgatgacgatttccacatcgtccaccagactttccaacatgcggaacttggtgtccggctcaaagccgggcagcacgcgcgaggcgtggtagtcgtcgaagagcttgcctccgaattccagatagagtttgccgccgaattgcgcgatgcgctttctgatgttggcggcttgcagctcgatgtatttttcgttgtcgaatccctggcgcatagaggtcggcatccctttccgaacgacgtcgtaaacggaaaaattataccggacgtcgtcggcaacaaaaaatgggattccccgatggggaatcccattcgtcatagagagcaattactcccgaggaatgttgaacaggggtttgcatggctcccaaaaacgcgctggtcgaaacgttgccgacgacgcgtgcgctcgaagagtatgcacgggtggctttgcggtgatttcccagaccgttcgttgctaggcgagatatttctttttccaggccttctttcgggcgtaagcgttttctgtcatgtcggagtagtcgtaatcaactttgaacttgccgttggaatggagaataagcgtcatcgatccccatctcttttcgggcttaagcgcggccctttcaggttcaatgaacttgttgatagccataaagtttttcatcaaggatgccctcgaaacgcctttttggtcaaagcatttaacgaagtcgtcttttccgctgccagcaacgtaatactcaatagagaacgcaccctcggcgtactcggcgtaaaacacgaccttgctccagtcttcggggagggtttcctcaagaattgaagctatcccttgtagcatcttcttttcactcattacatttcctttgcagtgttaagaagaaacgtaaccgtctcttcgccgtcaataatgtccgtgatagcaaacgagctaggcctgaatgacccgccctcataaagtggctcaaccttgaaaaacacttcagcgccatcagccaaagcatcggcgcatttttgctcgattgctgcatgggcttttggttaacctcgccgcccatggcgacaatattctcaaggccatttgatccattgaatcggtcggcaatcagatggcctctttgatcaaaaagctcttcaaacccttttccgattgactggatagtgtccttgatggtcaaacgaccttcgtgggtctttagttgtaagaagccttcggccgattcgaccctacccattgcatcggtaacgtatttatacccattgatctcatagctcatgttcggaacgaggtcgtcgccaacgcggtaaagctgcccgagatcgtcggttgcacacttcacgccgtcgatcgcaaactcgttattgggaagcagtcggtcgccttcgtaaattgcctttccggcatcatccagaattcgtgagcttgcgcccgattctgctgcctttgaggcaagaaagttatttagacctcgtccggcaagaagcgttgctgccgtaacagttcccgcaacgacttctccgacgatatcctcctgagatatctcaccgtcttcagcgccggcttccaagctctttcccatttcgtcaagaacgagtacagccccagcagcgagtgctgcaggggcagaagcggtgacggctacggcaccaagcgcaacttcagtggcgatttcgcctccagtttcgacatagtctccgatttcccgtatctgctcatcggcttccatgaagtcgccccaggcgttggctgcatcgtcaacagcgtgtgtttgcgcggttttcaccgctgcttcttcgtcttcggccagtagttcaatattcgattgaacaccgacatatgcgttttctccaacgtcggcaactccaagtacgaacctgccgccaagataagctccgttccttgcgccatcgcggacagtttcgcctgcagcgttgagtgttggctcgcatgctttccaggcgtcatctgcggcttcttgaactgttgaaatgctcgcggttaggacatcgccggaagaaatatcccgccatgcggcatctgcacaatcagcaacggtgcgttgcgcctcctcgaaggccaatctcgtttcggtcgtatccggcattaattgctctatattttcaaacgccatttagatcaccggccttgtttgagataagaccgctgatacttcggcgagtgctgaggccttttccgttgtctcgatgccggtacccctctttctcagctcgttgagatgagcgttaaacatcgactgaatgaacaggtattggattggtccccagctttcgggtgaggagtcatcttcgaatttccagcttgaaagcagatgggagcaaagcctctctttgaggctgtcggcagataaatccctggcgtcgtcgaggatgcgtccaatattgaaatacctataagcacaccattcaaacagtggcttcctcgagaacagaggagtccctgccatctcaatcaagcgtgccttcatggagtcaggtatgtccatcttgtgcacacagtcgcagaagttgtattcccttggctcatcgagcttgaacggattaagcacacaagagttgagatagcgaagctcttcagaagaaaccttgtccttcgcgctgtgcttgctctgtgttggcgagtactctaggccgcgttcatgcggttcgatgtgacagaggacaggttcggtccattcgttctgatatattgctgcaacgcctcgctgaagatttgcaagctcttggatttggctctcgttaagatttgccgccttgctgacaagcatcctgtcgccttcgtcaggcagtttccaggataagtcgatgcgatgattctgcctcaagcccagcgggttgttaagacgcggtcattttggcgcttacatctcactttttgcagacgtagaatacgggtattggaatcataggagggttctcatgccaaatatcggtaaggacgaccatccgaagccgtggtcgcttattttcgtgcttatcatcgcgctgaccttctgttgcttcgtcatgggccaaggactcaacagtggaaccagcgtcttcctggcaggccaaggttacggtgcgagccttgccggcgtacttgcactcgtcttctccattgccgccgcgttagcacgactgttcgtcggccctgttatcgacaacggcaagtgctcactcgttatcatcgccggcatcgctatcctcatagcaggaacagcactgtccgctgtcgttcaaggcatcccccctcttcacaatcagccgtttgctgcaaggcgtgggctttggcgcagcaacaacagcagcctcgaccgccgcagcaagcgtcttaccgcaagaacggctcggcgaaggcattggataccacggcctcggacaggctatcgccatgagcatcggcccagccttcgcactttacctagtaggaaccgatccctcaacgaacctctatgtcggccttgccctggttgggtttgcagggcttgtaatcgccctcaacgcacgctatgaaagtaaatggcaaactctgccaagctccagcgcataccgaatcaaaatggaaacccggctcgaactcgactcaaaagacgggcaggcacccagccccaccacagtaactacatccgaaacaattaacagtgaaaagtatcctgaaggcgaccaggtgtccaagagaaccctgcgtgactcattcaacatcttcgagccgcgcgcattgcctggcgccatcccacagatgatcatgtgccccacttttggctttggcgtcttctttgctggtctgtacggtactactctcggctatacccacgccggtctcttctacaccatcagcgcggtaagcatgattatcattcgcatgatttcaaagcatttcatggacaccgtacctgcaatcaaaacaatgaccggagccgtcgcgtgcggcatcctctgctgccttatgctacttgccgcaccgtacggggaacctgtcttcctggcgtccggaatcttctatggtctcgccactggcataagcctgccacttaatcaaagcgtagcggtaaagaacaccccgccagagcgctggggcgccgcaaacgccctgttcctgctcgccaatgacatcggcattggcttcgcaagcgtaatctggggcgttatcaatgactcattcgggttccagacaagcatcgtctgcgtcattgtctgccttatcgcaagctacgcatccgcctggatcgtctaccccgcccgcgacaagcggtggaggcattagagcgtaagcgtcaaaatgaccgcgtagcaggaaacgtccaggaccattccggcatacggatggaaaagtcctggacgtttccatctttgcgttgcggtatgccttaggccgctatgtcgctacaggccctcctcggcgttgttcgccatctcgtcgtcgaacgcatcggggtcgatgttaattatgaagtcgtcaggcatctctttggccttctcggcaacggctgggtcgagcttgcaggactcaggcaccctatccgaccacggcaggaacgagtccacaacctcatcggtgagctcgccggcgttgggtatctcggtcagcagccactcgacgtaaagcctgggattgagcccgttggccttggccgtggtggtgacgctgtatatcgccgcagacgcccgcgcgccgcgcggcgcatcgctgaagagccagttcttgcgccctacgacgaagattcgctgggcctgctcggcgacgttgttcgagagctccaggtgccccgtcttcgagcacgttcatgacgtagggctgttttgcttcaatgtttgttcgacaggttcggcagtgtttttccgcagtgtgggctgatggttttccccggtgtcgtcatcgtttcccggtgatgtgagaggcatcggtgccgccgcctgtatattcccgagttgcgattcggttttgattcggccggttgccgccggccggtgctcgggaaggaaaggaacatggcgataccgatgcccattgtgcaagatatcaggagactcgaccggcagggaatgtcgcgcgcgcagatagcgcggcgtcttcacgtggatcgcgggacggtcgcgaagtacgcggatatggaggattgctcgcccaagccgaaggcggatcgcaggtacgggtcgaagatcgacccgtacgcgcatctggtggacgggtggctggaggccgatcgtctgctgcccaggaagcagcggcacacgatcaggcgcgtgcacgaccgtctgctggcggagacggattacgacggcgagtattcgaccacgatgcgttacgtgcaccggtggcgcgaggcgaaccgcggcgtgccggatcgcgaggggtacgtgcggctcgagtgggcggcgggcagcatgcaggtcgatttcggcgtggcccgggcccggatcgctggcgagatggcggacgtgcattgcctggtggtctcgttgccgtattcgaacatgcggttgtgcgtggcgttgccgggcgagaacgcggagtgtctgtgccatggcctgatgctcgtgttcgagcatatcgggggtgttcctcccgtgatcgtgatggacaacgcgaccggtgccggccggcgcaacgcgaagggcgaggtcgcgttgaccggggtgttctccgcgttcgtggcgcattaccggctcgaggtccggttctgcaacccgtattcgggcaacgagaagggcagcgtggagaacgcggtcgggtttttgcggcgcaatctcatggtgccgcccatgcgcgcggaatcctacgtgtatttcgtcaagtcggtgtttcgtgtttagtcatgtatttttttcgggtttaggcagttgcatgcattttccttatttttccggttgcgcggaggtgttcctgccgaacatgagggcctcactgacgcggcggctctggccggtgaactcgaggagccgcccgtggtgcacgatgcggtcgatgatcgctgcggcgagtttgtcgtccgcgaagaccgtgccccatttactgaactcgatgttcgtggtgaatatgatgctccgtctttcgtagctgcccgcgatgatctggtagagcaggcgcgccccgtcgatgtcgaagggtacgtagccgaactcgtccagtatgatcaggtcggcacggccgatgtcccggagcatcgtctcgagcgtgccgtcgcgtttggccttgcccagctggaggacgagctcggcggtctgatggaaccgcacgcccagccccatgtcgatcgccttcatgcccagcccgatcgcgagatgtgtctttccgcgcccggtcttgccgtagaacaccaggtcctgcgcgcgcgggatgaaaccgagccctaggagctcatcgagcatgtagccgtcggggagcctgacgttcgtgaagtcgtagccgtcgagacccttgacgacggggagccgggcgcggcgcaggagcctgtcgtgcttcgcgcgttccctgttcgccagttccgtgtcgagcaggcggtggacggcgtcgacctggcggggcgtggcccagccggcgaattcgtcgatgctcgccttggagatgaacagcttgcgggccttctcgtagagcccttcgtccgtcttcgtgttcatcgcccgccttcctgcacgccgacgtccgcggtgaacgcgatgtcgtattcactcagatccggcctgtcatcgtcgtattcgatacccgccacgccctcggcgagcctggccgcgagcagtgtgacaccggcgcggtccgccccgccggtcgattcgaggatggaaagcatcgcctcgaccgcgttcgcccacccggattccctgtcaacgcgtttgagggtctgcagcgcctcgttgcgtgtctgtctgtcctgccgatccagccattcccgcaacgggtccggcaacgcgtcacgtacccggctgttgggccaggacgcgggcttgttgcacagcagcgccaactgcatggacgggtcctcgctgttcgtgctggcctggccgtacgcccgaggatgggtcgccagatgcttgcccgacgagtcgaggacctcgacctcgagcgcgcggaggcccacgatcacccctctgcccgcgttcgcccggtccgcggaataacgatgccgtccctcgagcgtgaccacgccgtaccggtcggccttcatatgccgccacgtgaccacgtcgaaacgcttcccgggcaacggcagcagcgccgcacggtcctcggagaacaggccacgttcctccgtgtccttgcggcagtgcggtttcgtggccagctccaggcaccggtccggcagcccggcgctgaagttctccaggctccatacgctcggccggggcacgaacagcttgcgccgcaccatgccgaccttggactccaccgcgccctcctcatgaccggaatacgggttgcagaacgaacaatcgaacccgtaatgcgcctggaaggcctggaacaggtgcgtcaggcgcggctcgcgctccccgtaccccttatggcccacgccggcggcgttatcgaacacgatccgctccggcacaccgcccagccactcgaacaggttgcgcaacgccaggcacgtgcactcagcgttctcgcccggcatcaactgcaccagaccgacgttcgaatacgggaaatcaagcacgaaatgatgcatccgctgcaccacgccgcgcaacagcacgtcgacctcgccgaaatcggcctgcgcctcgcctggatgccataccagatccatgaacgcctcatcacgctccgccgcgaactcacgcctgagccgcgccaccgcccgcgtcaccgtggacagggagacctccgcgccatgctcgtccctcaaccgctcccagatcctggtcgcggtatgccgctgcttgcgccagttcgcgcgatcctccgcgagccactgctcgatcacgggcagatacgggtcgatcaccgacgcgcgcggctttctcaccgacggcacggccgacagatcctccttcgcgaggtacttacgcaccgtcggctcgctgacatgtgttttccgcgcgatcgacgcgacggattccccgttccgccgcaaacgacggatagactgtacttggggcatgctgatcataatcctttccggtcctttctggcggagatacaagcaccatccagttaagaccattccgtggtcggcatgctctgcctaaacccgaaaaatcatcgtgactaaacccgcaacaactaattgaacacaaacatcctacgggcagctcagtcgtttcatgcttgaacggtgcgacgggctggcggcctcttcgtattgcccgaggttgccggacgtgcccgtggccgaggtgttcgacgaggagagggccgcgttgatgccgttgccgtccacggcgttcgacccggttcgctgggaaagccggacggccgacaagtacgggctggtcgacatcgactcgaaccggtacctcgccggccccgattcggcgcgttccaaggtgctggccgcgatccggtgggacacggtcacgctcgcatcgcccgccaccggcgagctcctcgcggaatatcccagacagtacggacggtcgcgcaatgtggaggatcccgcgctcgtgcttccccggctcgcggtcaaaccccgcgcgtggcgggaaagctcgatccgcccggacgtgcccgacgatatacgcgcgtggcttgattccatggacgaaaagacgttgagggagagcctcaaagcgatcggggacgcgtgccgggcggccgggttcgatcccgcgatgcaggcgtgcggcgagatcctgcgctcgaacagggacatgggcctgcacgcggacacgctcacccctatcgcgttgcgcatgcgcgacggcgagtgggaataccccggcgggatcgaggagcccgacctgagcggctacgaccggttcatcaccggcacggacgacggaggggaagaacggtgagcgtcagacccgatccggtgatcccggagacccgacgcaggcgcgcgtccacgaccgagaaaagcgaacgcatcctgaagatgagccgcagcctgaccctgacacgcagcgtgctcgccggcacgctcgccgaggccacgcccaaccagctcgacttcatcgaacgatggttcacggccgaactcgactcgcgcgagcgatccaaacgcctgcgcctgctcaaacaggccggcttccccgccgacaagaccctcgacggctatgactggaccaacctgaagatgcccgccgactgggggcgcgcgcagctcgagaacctcgacttcgtcgccggatgcgaggacctcgtgctctacgggcccgtcggcaccggcaagagccacctggccatcgcgatcggacggctcgcctgcgagcggggcgtcccggtgcgcttcttcaccgcgaccggactgctcatgcgtctgcgccgcgcccagcaggagaaccggctcgaccgggaactcgcgagcatcggcaaggcccgacttctcatcatcgacgagttcggctacctgcccatagacgaggagggcagcaggctcctcttccagatcatttccgattcctacgagacaaggagcatcatctacaccaccaacatcgaattcagcggatggggacgcgtgctcggcgacaagaacatggccgccgccctcatcgaccgcaccgtccaccacggacggctcatcagattcgagggccgctcctaccgaagcgaacacgccctcatgaccaaataaccaacacaacgcagacaggcagcggccgataccgcacaccctgcggaaaacccgctgcctacactgcggaaaaacaccgctcacaaagcggacgccaacttgctaaaacacacgtagggccagaactccacagcgtactgcagcgcacggtgcggcgccagcttcggcgaggctaggggaagctgggcccgcgcccatcccccgaagtcctccatgagcgggcggagctccgcgtcgcgggcggccttcctgccgcccggctccatgtcgtcgaacttggagtcgaccttgaacatggcgtcgatcctgcgccttgcctcgagcgcaacgctggccgcagacgccgccttggcgtcgccgccggcgatcttcacgatttgggcgaagtagcggcgcacgtggacgaggcacgccgtgttggcgatgttggggttgccgagattgaagtagggtttgtagccgttggcggtaagcgtgccggaccagcccgcaagaaactcctgggcaacgcccttcctgcgggtctcgtggtattcgaatacatacacgggcacgttgcagcgcgccgagcagaacagccacatcctcgatttcttcttcgcctcgcggttcggctctttcaggacctgaaccgtggtctcatcggcatgaatcctgacatgcgacagcagctcgaccttcattctctcatggaccttcgccagccagcgcgcgtgcacgttcatcatccagttcgccatgtcctggcgcgatatcgtcgcgccgcacgccttgaggtctgtctctatgcggtagagcggcagcgacatgacgtacttgccgttgacgatccaggcaagcagcgacggcgtcgcaaacgagcctggtatcggcggctcaggctgcggtgctcgcacgatgacgcccttgcgttcctattgagtttcacttgagtttcaggggcgtttttggggtggtgggacaaactactgggacagttcactctccgaaaaatcctttactcttcgtccgctgcgtgtcgccatgtccgtggtgtacgcgcttttagagtaaaaatgactgaaactgcaggtcaaaaggcataaagagaccccctgaaaacgttgtttccagagggtctcaatagtttttactcacccaaaatcacaggtggctttacgctttttcgtacgtggcggcacactgcgacactctacggacggaatttcgattgcgcaaaatccgctccagtttactcccactcgccaaagtaaaactggttctaaacaatactgtttaggggatttgactcttagttgctcaatttgataccaattatccaacttatacggcgttgtcggactcctgttatcaaaagattatcaagcccaatgttatcagcagaaaagcaatggtttggatcatctgtattataccacaagcagagtgctatttcaatcaaataagggactgcttcaactgtagaatccgtttttcaatctctcgaatgatctcgacaaagacttgatcttcgcttccggtcggatcttctaatccccagttatcgtcaaatgctctaccaatgaaaggacagcccacattgcaccccatggagattgcaatatcaggggcaggaatatccgagatcagtttggaatactgggttttctccatgtcaatcccgtacagttctttcataatgcggacagcatcctgattgatttgcggttttgtttccgttcctgcggaatagctttcaaacacatcggaagccaagtgttttcccaaggcctcggcaatctgactgcggcaggaattatggacgcagataaatgccacctttttcttactcatatttgaaccagtctttcgttttatttgcgtttttttacaaggaacagcatcacgggaacttctgtcagcacacccacagtcgttgccagtgccgcaggggaagtcgttccaaacaaggcgattgcaacagcaacagccagttcaaagaagttggaagcacaaatcattccggcgggagcagcaatcttgtagggcagcttcaaaacccggcaagcgatatacgcaatcgcaaaaatcaggaaggtctgtaaaatcagcggtaccgcaatcaaaacaatgtgcagaggtttttccagaatggtattgccttggaacgagaaaatcatcaccagcgtcagcaataagccaatggtagttacactgtcaaacatatggatgaaagtctcctcaaagtacactgccccttccgcttgatgacagccgaacgggtcagcataccgccagccagaggaaacaccacaaacagtaccacagagagaatcagggtatcccacggaacgggaacattggaacgcccagcaaaaaatgcccgttgagttcgatttgagtttcacgggccccgaaacggccccgtttcgccctcggggacaaaaaccgcgcgtcaactcacttgggataaatccttactcccattccctcgaatacctccccgtgccttgttgtcttgaaacacggggagtaaatggcgaaatcgcaggtgaaagggagtaaaacggcaaagaaaaagcctccgttccaacgagggaacggaggctaggaaatcgtttttactcactgccgtcgctggcggttttgccatgactctcgtacgaaacgaaactcagcggtacaccacggcactcaaaagagcaggtcaaagccctatcggcttactcccattcgatggtcgccggcggcttggaggtgcaatcgaggacgacgcggttgatctggcggcattcgttggtgatgcgcgtggagatcgtggcgagcacatcgtaggggacacgggaccagtcggcggtcatggcgtcttccgagctgaccgggcgcaggacgatcggcgagccgtaggtgcgctcgtcgccttggacgccgacagagtgaacgtcagccagaagcacgaccgggcactgccagatgtcgcggtcgagaccggccttggagagttcctcgcgggcgatggcgtcggcctcgcgcagcaggtcgaggcgctccttggtgatctcgccgatgatgcggatgcccagacccgggcccgggaagggctgacgccagacgatttcgtcgggcagaccgagctcggtgccgatggcgcgcacctcatccttgaacagagtgcgcagcggttcgatgagctggaacttgatgtcctcgggcaggccgccgacgttgtggtggctcttgatgttggccgcgccgtcgccgccgccggattcgacgacgtcggggtagagcgtgccctgcacgaggaacttgacctccttgccgcgggcgccggcctcttcgaggacctggcgctgggccttctcgaaggtgcggatgaacttctcgccgatgatcttgcgcttgcgctccggctcggagacgcctgcgagggcgtcgaggaagtcgtcggcggcgtcgacggtgatgaggcggatgccggtcgcggcgacgaagtcgtgcttgacctgctcgacttcgcccttgcgcagcaggccgtggtccacgaacacgcaggtgagctggtcgccgatggccttgtgtaccagagcggcggccacggcggaatcaacgccgccggacaggccgcagatcacctcggcgtcgccgacctgctcgcggatcttcttgacttgatcctcgataatcgaggaggcatcccagtcgttgggcagcgcggcgcaacggtgcaggaagttttcgataagcttctggccaagcggggagtgcttgacttccgggtgccactgcacaccatagagcttgcgggattcgtccgccatggcggccacgggcgcgccttcggtgtgggccagcacttcgaagccggccggggcctgttcgaccgccacaccgtggctcatccacgtggtctgctcggcgggggagtcggcgaggatgccggcggcgtcgtcgatggtggctgaggtcttgccgtattcgccgagcgcggccttatccaccttgccgccgagctcataggccatgacctggaagccgtagcagataccaagcaccggaacaccggattcgaataccttggtgtctatggtcggcgcgccgggctcgaacacggaggccgggccgccagacagaataatcgccttcggatccttggccaggatctcgtcgaccggcatggaatgagggaccagctcggagtacacgcctgcttcgcgcacgcggcgggcgatgagctgggcgtactgggcgccgaagtcgacgacaagcacaggaccgtttgccattgatattcccctaacgttcattggaattttacgtgggctgaacacccctgattatcactggtcaaggcgacaaggccgacacgcagagactatgtgcgcaaatcgaacaaactacatgcctgtagacggacaacacgccgatttcgaacatgggaaatcgaacgtgcgctgttctatccaaatgctggatttccgcatgcttccgctgttttgaaaaagtatgttgaaaaaactaatgttgacaaacggtcagtcgaaccgcacaaatactgaaatatccgcaacaatttcgaacacacccgcaagaaatcgttcaaaagtcgcgttgtcctcgtaccatgacgattgattgggaacggaaaaccttggcaccgcaagggtcagggaccgtgaccgaacagaaataatcaatcgcacgatcacgtgcaggagtacaggagtacacatgacgagtcctgttattggcaccccttggaagaagctcaacgctccggtttccgaggaagccctcgaaggcgttgacaagtactggcgcgttgccaactacctttccatcggccagatttatctgcgttccaacccgctgatgaaggagcccttcacccgcgaagatgtgaagcaccgtctggtgggccactggggcactacccctggcctgaacttcctcatcggccacatcaaccgtttcattgctgaccacggccagaacaccgtgatcatcatgggcccgggccacggtggcccggccggtacctcccagtcctacctggacggcacctacaccgagaccttcccgaagatcaccaaggacgaagctggtctgcagaagttcttccgtcagttctcttacccgggcggcattccgtcccacttcgctccggagaccccgggctccatccacgagggtggtgagctgggttacgctctgtcccacgcttacggcgccatcatggacaacccgagcctgtttgtcccggccatcgtcggcgacggcgaggctgagaccggcccgctggctaccggctggcagtccaacaagctcgtgaacccgcgcaccgacggtatcgtgctgccgatcctgcacctcaacggctacaagatcgccaacccgaccatcctgtcccgcatctccgacgaagagctccacgagttcttccacggcatgggttacgagccctacgagttcgtcgctggcttcgatgatgaggaccacatgtccatccaccgtcgcttcgccgagctgtgggagaccatctgggacgagatctgcgacatcaaggccaccgctcagaccgacaacgtgcaccgtccgttctacccgatgctgatcttccgcaccccgaagggctggacctgcccgaagtacatcgacggcaagaagaccgagggctcctggcgttcccaccaggtgccgctggcttccgcccgcgacaccgaggcccacttcgaggttctcaagaactggctcgagtcctacaagccggaagagctgttcgacgccaacggtgctgtcaaggacgacgtccttgccttcatgccgaagggcgagctgcgtatcggtgccaacccgaacgccaacggtggtgtgatccgcaacgacctgaagctgccgaacctcgaggactacgaggtcaaggaagtggctgagtacggccacggctggggccagctcgaggccacccgtaccctgggtgcctacactcgcgacatcatcaagaacaacccgcgcgacttccgcatcttcggaccggatgagaccgcttccaaccgtctgcaggcttcctacgaagtcaccaacaagcagtgggatgccggctacatctccgacgaggtcgacgagcacatgcacgtctccggccaggtcgttgagcagctgtccgagcaccagatggaaggcttcctcgaggcctacctgctgaccggtcgtcacggcatctggagctcctacgagtccttcgtccacgtgatcgactccatgctgaaccagcacgccaagtggcttgaggctaccgtccgcgagattccgtggcgcaagccgatcgcctccatgaacctgctggtctcctcccatgtttggcgtcaggaccacaacggcttctcccaccaggatccgggtgtcacctccgtcctgctgaacaagtgcttccacaacgaccacgtcatcggcatctacttcgccaccgatgcgaacatgctgctggccatcgccgagaagtgctacaagtccaccaacaagatcaacgccatcatcgctggtaagcagcctgctgccacctggctgaccctggacgaggctcgtgccgagctcgagaagggtgccgccgcttgggattgggcttccaccgccaagaacaacgatgaggccgaggtcgtgcttgccgccgccggcgatgtcccgactcaggagatcatggctgcttccgacaagctgaaggaactgggcgtcaagttcaaggttgtgaacgttgccgacctgctctccctgcagtccgccaaggagaacgacgaggctctgaccgacgaggagttcgccgacatcttcaccgccgacaagccggtgctgttcgcgtaccactcctacgctcacgacgtgcgtggcctgatctacgaccgtccgaaccacgacaacttcaacgtccacggctacgaggaggagggctccaccaccaccccgtacgacatggttcgtgtcaaccgcatcgaccgctacgagctgaccgctgaggctctgcgcatgatcgacgccgacaagtacgccgacaagatcgacgagctcgagaagttccgtgatgaggccttccagttcgccgtcgacaacggctacgaccacccggactacaccgactgggtgtactccggcgtgaacaccgacaagaagggtgccgtcaccgctaccgccgctaccgctggcgacaacgagtgataacacctccacggtgttgttagttcgctaacaccaaagggctcgggattcgtcccgagccctttgcttattcataagccctgtcacggcggggcagaacaaagcgaactgttgtgatgttttaatcgcgtagcaccctgaaatgcagcagggcattgcgcacaccgtcgtggtccacatcgtcagtgatgtagtcggcggcggccttgggctcggcggtcgcattgcccatcgcgaccccgatgccggcgtaggcgagcatatccgtgtcattgccgccatcgccgaaggccatggtctgctcgcgcgtgatgccgtaatgcgccatgaaccgctggatgccgcgcggcttgccgccatcggccggaatcagatccgtgaaatccggatgccaacgcaccccgcgcacattgctgcacagtcccaccagttcggcctccagctcgggcccgacaaagggactgatctggaaagtctcatgatccagcgcgcgggtgcgcgggtcctcgaaataccgggtcggtgcggttttgcccagtttgctccacgtggcgcgaagcagatcattggactggttgaagtacacgtaatccttctcgccgaaattgcacaccacatcggggtgacggtccagccagtcgagaatcacctcaatatcagcagtatccaaggcctgcgaggcaaagaagccggtgtcatcaaaacaatactgcccattgaacgccaccacgccatcgaacgtcaccggcatggtatccagcaccacgtgcatctgtgaaggcgcgcggcccgtgcaaatcagcaccttgacgcctgcggcctgcagccggtgaatcgcctcgattgtggaatccggcaccgtatgggtcgtgaaactggtgagcgtgccatcgatatcgaagaatacggctcggatatcggcattggcagtatcggtagtcatagcttccattgtcaaagcccctctcgacgtgctttccggcgtgttcggcacgcctatagcgggttatcaaacgcacgaatcccggacattgcatgcgcgccataaaagacacctatatggcaatcggccattttccgtcactttcgcggttcaagcgcgttatggtgttacccgacatcaattttggagagaggaaatccaatgacagcagcaacccagccggcaaccccggccgctcctaacaataacgagccggtgcgtgtgaaccacaccgcccgcaacgtcatcatcaccatcgtggtcgtggcgattatcgccgtagccgcgttcttcggctaccgcgcgtttgccggtgccaacgagtcgtccgccaagggcagcaagggcaacccggtcaagatcggcgtggtcggcgctaccaaccccgaatgggtcaagttcaagcaggacgccgagaaggccggcatctacgtcgacatcgtcgacttccaggactacacctccgaaaacccggcccttgactccggcgagctggacctcaacgaattccagcacctgctctacttggccaactacaacgtgagcaacaagaaggacctgcagcccatcggcggcaccgccatctacccgctcggcgtgtactccaccaaggtcaaggacatcaaggacctgaagcagggcgacaccgtcaccattccgaacgacgaaaccaaccaggcccgcgctatcggcgtgctcaaggccgccggtctcgtgacgctcaaggacgactggaccgccttctccaccccggccgacatcgacgaagccaagagcaaggtcaaggtcaccccgctcaaggccgaacaggtggccaccaccctgaaggacccgaccatcgccgctggtgtgatcaacaacgactacgtggccgacgccggtctcgacccgaaggacgccatctaccaggatgacgccgaatccgaagaagctcgcccctacatcaacgtgtgggtggcccgcaaggcggacgtgaacaacgagacctacaagaagctcgtttccatctaccagcagaaggatgtgctcgacgccctgcaggagaactccggcggtaccgcggtgttcgccgacaagttcagcgccagcgagctgcaaggcttcctgtccgacattgagaaggatgccaaggcccagcagtgagccgcggctgatacgagcgcacgactaacctatccatagccactaccaccaagcggagcgagtacccgagccaacaatcgggattcgctccgcttccgtgaccggacaccaacaaccagcatcagggagcactatgagcgaccccatcatcaccttcgaccatgtcgtgaaggaattcaaaacacgcggacgcggcgcgaacatcgcacgagccgtggatgacgtcagcctgaccattgatcgcggcgacatcttcggcatcatcggctattccggtgcaggcaaatccacactggtccggcttatcaacgcgctcgaacgacccacctccggcactgtgaccgtgcttggtactgatatcacctctctgagtgagaccaagctgcggcccatccgccagaaaatcggcatgattttccagcagttcaacctgttctccaccaaaaccgtggcccagaacatcgcctacccactgcaactcgatcactggcgcaaggactatcaggatcgtcgtgtcaacgaactccttgaattcgtgggcctcagtgagcacgcaaacaaatacccttcgcagctgtccggcggccagaagcagcgcgtcggcatcgcccgcgcactggccactaatccggagattctgctcgccgacgaagccaccagcgcgctcgacccggaaaccaccaccgaagtgctggccttgctcaagcgtgtgaacgaggaattcggcatcaccattgtgcttatcacccatcagatgaacgtggtccagcagattgccggccgcgtggccgtaatgagcgccggacgcgtggtcgaatccggcgacgtatacgatgtgttcgctgcaccccagcagccggtgaccaagcgattcattgccaccgcattgtctggcctgcccgaggaagaccgggtcgagcgattgcatcacgaatggtcgggccgcattgtcaccgtgcttatccgccaaaaggacgtttccggcacccaaggccatgaactcaaggcatccggacagaatatctccgaactcatcgccaaatacggcgtcgaatccagcctgctctacggcggcatcgacacggtcaaggggaccgccatcggtgccatcacctacgaattcaacgggcccggctggcatgtggacgaattcctgcgcgagctcgccgccaatagcgacgtcatcgacttcggcaccgccgcaaagcctgtggcctacgccgacgcagtcgccggacatgcctcctacgccgaagaccgcgcccatgacccactggcggccgatactgccaccgcgcccgccgcgtccgccgccgcacatgaaggagccaacgcatgatcatcctcgccaacccgcgtagcgactggaacgtgctgcgtccactactgttcgaatccattggccagaccctgaccatggtgctcgtcaccctcgtcatcggcggattcctcggcctgatcctcggcgtggtgctctatggcacccgccccggcaacctgttcgagaacgcggtcgtctaccgcatccttgacatcatcgtcaacatcgtgcgcccgattccgttcatcatcttcctggcagccatgcagccgctcaccatcgtcgtggtcggcacgtccatcggcaccgtggccgccatcttcccgatggtggtgatgtgcaccttcgccacctcgcgtctggtcgaacagaatctcgtgccggtcgacccgggagtaatcgaggccgcgcgttcgatgggtgccggcaagctcaccatcatccgcaccgtgctcatccccgaagccctggcaccgctgatcctggcctacgccttcctgttcattggcgtgctcgacatgtctgccatggccggctacatcggcggtggcggtctcggtaacttcgccatcgcctacggctaccagaagttcgaccagaccgtcacctggacggccgtgatcatcatgatcgtactggtccaggtggtgcagggcatcgccaacgccatcgccaaacgactgctcaaacgccagcaataacaaggcatactgaccccatagatcgcggccctcgccaatatggagcgagggccgcaatttattcttcgcgctactagaatcgggaaccatgagtgaacatatcgacatcgaccacgaactcatcactatccgccactacctgcacgcccatccggagcgtagtttccgtgaattcggcaccagcatctatctgaccgaccagctcaaggcgcacggcatcgagatcctgcacaacccgctggagactggtgttgtggggctcattcagggcgaggccggtcccgggccgcgtatcgggctgcgcgctgacatcgacggcctgcccatcgtggaagactccggactggagttcagctccgtcaatgaaggcgtgatgcacggctgcggccacgacctgcacatgaccggtctgctcggtgccgccttctggctcgccgagcaccgtgacaagttcgccggctcgatcaagattctgttccagccgagtgaggagaccggccaaggcgctcgcgccatgatcgacgccggactcgtggatgacgtcgaagccattatcggcacgcacaacaaccccaactatgcgcccggccagctggccatcggcgttgagccgatgatggccggctgcgtgaaattccgcgtgaccctccacgcccaaggcacccacgccggttacccgtacaagggcaccgggcccatcgaagcgctcgccagtattattctgagcctgcagaccatcgtgagccgcaacgtcacgcccttccacccgctggtgctgtccgttaccgaagtgcacggcggccatgtgtggaacgtggtgcccgccgaagccggattccaagggactgtgcgctatttccacaagtcggatggcaatctggtcggccgccgattcaaggaagtggtggaacacaccgccgaggcatacggcatcagcgccgacgtggttcgggatgactttcaagacccgctggtctccgatccaggtctcgccaaggccgtggcggcggatgtcaacgactacgcgcagctcgaaccgatacgtcagtcgatggcgggggaggacttctgcgaattcgccaaggtgacgttgccggtgttcgcgttcgtcgggtcaaacggccaggaaggttgcgccgactggcatagcccgcatttcgtgggtctcgacgaatccattcccaccttcgtcaacttctacgtcaacaccgctctgcgcgtgctcaacgagctgaagtaaatccttttctggctcgcctccggaggctgaggcgttaggcagacagcccagtgggctgtctgtagccgaaggtgaggcgacagccgaaccagatatgcgcgggcctcgcccgtccataagtgcaggacgagctatcagcgaagctgactgaggggagtggcattcgttcattaggtcgattcatcgtccattaggtcggtgaacggcgatactggttgttggaatcgcgccattgcaacgactgatatcgcattgcagtgacctaatgaacgcaaaaacgacctaatgaatgacgccaagccggaagaacaggcaatccgacgtcatacgcggctacactaagaatctatgacacagcttcgcttcgcactcgcccagatcgacacctgcgtcggcgcgcttgacgccaacgccgccaaggtgctcgactactcccgtaaagccgccgcaggaaacgcccaagtggttgttttcccggaaatgaccctcaccggataccccatcgaggatctggccctgcgccgcaccttccgccaagccgcatgggacaaggccaacgaactcgccacccagctcaacgacgacggcctcggcgatctgttcgtggtggtcggcaccgtgggcaccgaccgcaagacctccaagccgcgcaaccgactggtggtcttgcaccaaggcatggtctgggctggctacgacaagcacttcctgcccaactacggcgtgttcgacgaattccgcatcttctccgccggcgaccgctccgtgaccctcgacgtggacggcgccaccattggcgtggccatctgcgaggacatctggcaggacggcggcccggtggccgacctggccaccaagaacatcgacctgctgctcaccatcaacggctcgccgtatgaggaaggcaagaccaacacccgtttcgagctcgcccagcgtcgtgccgccgaggttaacgccccggtcatctacctgaatcaggtcggcggtcaagacgacctcgtcttcgacggcggcagcttcgtggtcgacgccgacggcacgcttatcgaacgcagcccgatgttcatggaaaacctgacgttctgggacttcgattccgccgccgaacatcaggccaaggccgagatcgttccggaactcgacccggacgaagaggtatacaccgcctgcgtgctcggcctcaaggactacatggccaagaaccacttcaccggcgtgacgctgggcctctcaggaggcatcgactccgcactggtagccgccatggcggccgacgcatgcggcggcgagaacgtctggggcatctccatgccctccatgtactcctccgacggttccaaagacgacgccgccgatttggcctccaacattggcgcccattacgaggtccagcccattgagccattgttcaacgcctaccaacagcaacttgaccttgatggcgtctccgccgagaacctgcaggcccgcatccgcggtgtgatcgtgatggccagctccaattcgcgcggtctgctcgccgtggccaccggcaacaagtcagagctcgcctgcggctactcgaccatctacggcgatgcggtaggcggctacgcacccatcaaggacctgctcaagacccgtgtctgggagatcagccgttggcgtaacaaggccgcggccgcaggcgtcggcatcggcggtctcaagatcgtgggcaacgaggacggcaacaccggcatcccgttgaaggacggcgtgatgattccggtctcctccatcgagaaggcaccctcggccgagttgcgccccgggcagaaggactccgactccctgcccgaatacgcgctgctcgacaaggtgctcgccgcatacatcgagcacgcgcacggccgcgccgacctgttagccgacggcttcgaccaggtcaccgtagacaccgtgatgcgattggtggaccgcgccgaatggaagcgccgccaatacccgctgggaccgaaggtcacggccctcgcgttcggccgcgaccgccgactgcccgtcaccaacgcattcagggaataaacatatattgctcccgccagcgggagcaagtaataccgttgaggaggtaccaatgacagacgataacaagaagcagtggtatttcaacaccgtcaagaagcaggccgagttgggcatggtctcaccgatcgaacagcgcatgggtccgtacaagaccaaggaagacgccgaacatgcgtgggacatcgtggtggaccgcaatgccagatgggaggaggagaaccggcgctggaagaactacggcgtgaaacccgcacaggctcgccccgaggattgacggtcgaaaactgactgatacggttctgctgtcaatctcaagaccgaaccgctcatacgaacatcacagtatgagcggtttcccatatctggagacgtgcaatagtcccatcaatatctagaagccattggaatggtagcgttcacagaaacaatgtgagatagctcactcccaatttcagcttttctcaagcaagtgccaactacactgttgaaccaagggttccgtgaagatgcgaaacctacaaccccatttaaggagtgacatgaccgcagtggaaaatgcagctgtctcccaggaggagctcgacgccaaggcgtgggccggcttcaccgagggcaactggcagaaggatattgacgtccgcgacttcatccagaagaactacaccccgtacgagggcgacgagacattcctggctcctgccaccgagaagaccaagcacctgtggaagtacctcgacgacaactacctggccgtggagcgcaagcagcgcgtctacgacgtggacacccataccccggccgacgtcgacgccttcccggccggctacatcgactccccggaagtcgataacgtggtcgttggcctccagaccgacgttccctgcaagcgcgcgatgatgccgaacggtggctggcgcatggtcgagcaggccatcaaggaagccggcaaggaaccggatccggagatcaagaagatcttcaccaagtaccgcaagacccacaacgacggcgtcttcggcgtgtacaccaagcagatcaaggtcgcccgccacaacaagatcctcaccggtctgccggacgcctacggccgtggccgcatcatcggcgactaccgccgcgtcgccctgtacggcgtgaacaagctcatcgccttcaagaagcgcgacaaggactccgtgccgtaccgcaacgacttcaccgagccggagatcgagcactggatccgcttccgtgaggagcacgacgagcagatcaaggctctgaagaagctcatcaacctcggcaacgagtacggcctcgacctgtcccgcccggcccagaccgcgcaggaagccgtgcagtggacctacatgggctacctggcctccatcaagtcccaggacggcgccgccatgtccttcggccgcaactccgccttcctcgactgctacatcgagcgcgacctccaggccggcaagatcaccgagaccgacgcccaggagctcatcgacaacatcgtcatgaagctgcgcatcgtgcgcttcctgcgtaccaaggactacgattcgatcttctccggcgacccgtactgggcgacctggtccgacgccggcttcggcgatgacggccgttcgatggtcaccaagacctcgttccgtctgctcaacaccctgaccctcgagcacctcggacctggccccgagccgaacatcaccatcttctgggatccgaagctgcctgaggcctacaagcgcttctgcgccaagatctccatcgacacctcggccatccagtacgagtccgacaaggaaattcgtagccactggggcgacgacgctgccatcgcatgctgcgtctccccgatgcgcgtgggcaagcagatgcagttcttcgccgcccgcgtgaactccgccaaggccctgctgtacgccatcaacggcggccgcgacgagatgaccggcatgcaggtcatcgacaagggcgtgatcgagccgattaccccggaggccgacggcaccctcgattacgagaaggtcaagaacaactacgagaaggccctcgaatggctgtccgagacctacgtcatggccctgaacatcatccactacatgcacgataagtacgcgtacgagtccatcgagatggccctgcacgacaaggaagtgtaccgcaccctcggctgcggcatgtccggtctgtccatcgccgccgactccctcgccgccgtcaagtacgccaaggtctacccgatctacaacaaggaagccaaggacctcgaaggccacgagtacgagtacgttgagggcgccgacgacgacctgatcgtcggctaccgcaccgagggcgagttcccggtctacggcaacgacgacgaccgcgccgacgacatcgccaagtgggtcgtctccacggtcatgggccaggtcaagaggctcccggtctaccgcggcgccgtcccgacccagtccatcctgacgatcacctccaacgtcgagtacggcaagaacaccggttccttcccgtccggccacgccaagggcaccccgtacgctccgggcgccaacccggagaacggcatggactcccacggcatgctgccgtccatgttctccgtcggcaagatcgactacaacgacgctcttgacggcatctcgctgaccaacaccatcacccctgatggcctgggccgcgacgaggacgagcgcatcggcaacctggtcggcatcctggacgccggcaacggccacggcctctaccacgcgaacatcaacgttctgcgcaaggagaccatggaggacgccgtcgagcaccccgaaaagtacccgcacctgaccgtgcgtgtctccggctacgcggtgaacttcgtcaagctcaccaaggagcagcagctcgacgtcatctcccgtaccttccaccagggtgccgtcgtcgactgatgaccaaccccgcgaaccgcggcaatgactaactgaaggggtggggcacggctccaccccttccttatttcccacagactttcgcatcatttggaacaggaggacaacgatgcccgcaacacccacgttccgcaccacgaccaggcatatgctcaaggaatcgaagacctatgcctcgcagactttgatgggcggcctttccggctttgaatccccaatcggactcgaccgacgtgaccgcctttccgccctgaaatccggtgatatcggcttcgtccactcttgggacatcaacacctccgtggatggaccgggcacccgcatgaccgtgttcatgtccggctgcccgctgcgctgccagtactgccagaacccggacacttggaagatgcgcgacggcaagcccgtctaccttgacgccatgatcaagaaggtcgatcgttacaaggacctgttcaaggccacgcatggcggtatcaccttctccggcggcgaatccatgatgcagcccgccttcgtctcgcgtgtgttccatgccgccaaggagatgggcgtgcacacctgcctcgacacgtccggcttcctcaacacgaattacaccgacgagatgctcgaggacatcgacctgtgtctgctcgacgtcaaatccggcgacgaggagacctatcacaaggtcaccggcggcaccttgcagcccaccatcgattttggccagcgactggccaaggccggcaagaagatctgggtgcgatttgtgctcgtgccgggcctgaccgactccgaagagaacgtcgaaaacgtggcgaagatctgcgagtccttcggtgatgccgtcgaacacatcgacgtgctgggattccaccagcttggccgcccgaagtggcacgaactgcgcatcccatacccgctggagaaccagaagggacccaacgccgccacccgcgaacgggtgaccaaccagttcaaggaccacggcttcaccgtgtattaaattgcagggccgaaccgcgcgtaaataccacgattcggcccgttcgcccataccctagagatatggccgacatctacgcatttcctacgggagagtccaacgacggacgccccgtgcgccctcagggtgtgccggatgaagtatgggcagccgtcgaatccgtcagcaccatgaagcgcatccatgacgtgcgctatcgggagattcccgtgccttccaccttggccgattatggtatcggcgtggaattcgaagcgggagagcgtgccctcggcgatgccttttccgccggtcttggcagcgatgccgaatcacgaatcgccacaggctggatcatgatgctttatgctcatgagctgcgcattgactgggattccaactggcgttgcgtggcgttcgcgcgactgccgctggaaaccgccgaaaacgattctctgacccccggcatgtactgggatgacatgtgcgactatttcgacggcatcgagccggattcggtatccggcacagtcaccgtgacccaaaacacggcttttggctcgatggccggctccaccagcgccgggtgtgagattcgcgtctcatggaccccgcttgacgggaccgggccggacggtactatggacgccggcgcacaagtccgctcgtgggccgcattcatcagatccaccatccgttttgaggaggatgacgccagttgagtgacgtccgtgacaccgagccccgactgctgaaagagcctcgcgggggagtacccgatgtcacttcgacgctggacggctatcatcgtgtctgcgatgcgatggccgaggcgacgggctcgctggccgccgacgccgaacgggcgtccggcttccgctatggacacgaggattggctgattcagttcaaacgtgagggtgcaggcatcgccttgcttgatcccgtcgccctgacccgggccggagctgattggaatgaattcaatgacgccgtgggcgacgccacgtggattctgcatgattctctgatggacttgcccggattcgccgaaatcgggctcaaacccaaagccctgttcgacacggaaatagcggcgcgattgctcggcctgcaccgctttggtctggccgccgtcaccgaacactacctcggcatcacgctagccaaagagcattccgccgccgattggtcctaccgtccgctgccgcgcgactggcgcaactatgcggcgctcgacgtggaggtgcttatcgaacttgaaaccatgatgcgtcgtgacctgaaagccgcaggcaaggacgagtgggccgctgaagagttttctcacgctttggttgcgggccttgccccgcgcaaaccgcatccgattccttggctgcgtatctcgcgcatcacccagctgagtcgtgatccaaggggcttggccatcgccaaatccctatgggaggagcgcgaccgactcgcccggcaatacgatattgcgcccagcctgttattggccgattcatcaatcatcgaggcggcgaccaacaagccgcacaatgctgcccaattccgcgcgctccgatccctgaacgagcgtgtgcgcatccataccggcaccgagcaggacaaaatgttcgagcggtacgcgccgattcagcgtgcggtcaaaccgaaggtctggaagcaggccatcgatcgagccatagccctgaagcccacccaatggcctaccatgcccgcccccgaacaggacgaaaacggtgtggtgaacgcgccccgatccatgcggctgtggcaacagcgccatccggagcgttatgaccgtctgcaacgggtgcggcgtgtgatcaaccgcatcgccgaagacacccgcacgccggccgagatgatcatcaagccacagatcctacgcaacctgtgctgggtggaagacccggtggaagtggacgtcgagacgttcctgatcgagcagggcgcaaggaactggcaagtgaaactcattgcaccgtccgtaagtggcgttatcatgtagaggttgccttacggcagaactgtaagaaataacgacttttgaggagtcattagcgtgaagatcagcgttcgtaacctcgagcccaccaaggtgaagctcaccgtcactgttgaaccggaagagctcaacccgtatctggatgcggcccgtaaggaaatcgccaagcaggtgaacgttcccggcttccgtaagggccacgttcccggcaagatcatcgaccagcgcatcggtttcgccgccgtcgccggtgaggccgtgaacgacgcggtcccggagctgtactccaaggccctggatgagaagaagattcgtccgatggctcagccggagttcgacgtgcaggatgttccgcagtccgccaacgacgagaccaagctgaagttcaccgccaccgtcgagcgtcgtcctgacatcgaactgccggaaatcgacggtcttgagatcgccatctccaagccggaagtcaaggatgaggacgtcgacaagcgcctcgagaccctgcgtcagcgcttcggcaccttggtcggcgtggaccgcccggccgccaagggcgacttcgccaacatcgacctgactgctgagattgacggcgagaccgtcgactcccaggaaggcgtgagctacgagctcggctccaacaccatgctcgacggtctggacgaggcccttgacggcctgtccgccggcgaggagaccaccttcgaaggcacgctggaagccggcgagcacgagggccagaaggccaccgtgaaggtcaaggtcaactccgtcaaggctgaggaactgccggagctgaacgatgagttcgcttccgaagcttccgagttcgacactctggacgagctcaaggctgacatccgcaaggctgccgctcaggacgccgaaggtcgtcaggccaccgaggctcgcgatgccttcatcgccaagctgcaggaaggcctcgagatcccggtgccgaagggcgtcaaggccaacatggtcgaagagcagctcaagggcatgaccccggacccggagaaggccaccaaggagcagaaggctcaggccgaggagaccgtggagaaggatctgcgcgatcagatggtgctcgacgctctggccgagaagctggacgttcaggtgtcccagtccgacgtgttcaacttcctcgcttccatcgcccagcagtacggcatggatccgaacaacttcatccaggccatcatcaagaatggccagcttggctccgctgtgcaggaagtcggccgttccaagggcctgctcgccggcatgcgcgccgtcaagttcaccgctgatggcgaggttgtggacctctccgccttcctgggcgaggccgctgaggacgaagagtccgagtccgtcgaggccgcttccgctgctgccgccgtggccgacgaactgtccgccaaggatgacgccaaggatgctgagtgagcatagcctcatcgcgttagcgtgattgtttgagcccggaatcgtgtttcatggttccgggctcttcctattctggcaaaaggactatttctttggctcccctctttgaggggagctgtcgagcgtggcgagactgaggggagttcccaaggcatactcgttgcatagggtgcggaggttgacatgcagccaacggttactatcaaacgccttggttggctcgctgcggcgaccattgtgctcggcgtgctcatcggtgtgggagcaggtctgctgaccctgttgctctacggcgttgaacatgtgctgctcggctacatcgaaggcccagaattgcctggtccattcggcgtgcccgctgcacgccgtgcgatatcggtgaccgtgggactcagcatcgcaggcattatctggtatctgctgcgacacaaaacgactgcggtgccctcagtcaagaaggccgtggcgggaaagcgaatgcctttctggcaaaccattgcgcatgtggtattgcagattttcatcgtcggctccggtgcctcgatcggccgagaagtcgccccacgcgaactcggcgccatgctcgcgcaacgtttctgcgacctgttccatatcgagggcgttgacggcatcgaccggcgcatggtggtggcagtggctgccggtgccggtctaggaggcgtctatgacgcgccactggccggcatgttcttcgccgtcgaaatcctgttggtagatgtgacaatcgaaaaagttgcgtttggactgggcatgtctgccattgccgcattcgtggcggttgcgatcaaagggcattgcctgttctacgacattaccgccatgcaaccggaatccacgccaacgttaatgctgttcgctctgatctgcggtgcggcatgtggagtgggcggcgcattgttccgaaaaggttcgcaatgggcggaagcgcacaagccaaccggtaaggctattctgtggcagatgacgctggctggtctcatcaccggtttggtggcgattgttgtgccgcaggtgatgggcaacggccgtgccgcagcgcaacttggattcagcacattcattcctgaaaccgccggcactgctggtgccatgcagtcggcatcttcagcggccgcctctccatggaacttgctgacgggcggcggtaatgtatccgattcggcctctggcgggggagcgggctctggaatggcatcgttctgggccatgcttcagggtgggagcggcccttctggatccgtgatgaacgccggtttcccgctgtcccagtccaatatctggatgttgctgggtgtgttggcactcacctttgttgccaaagcgctggtgacgctgatgaccattcgctccggtgcgtcgggcggtgtgctgcagcccggcatcgcattaggttccacgctgggtgcgatgctcggtctcgtatggatactgatgtttccgactgattcggtaactgtgtgtgccttgatcggtgcggcttcgttgctttcggcctcacagcaggcaccgcttatggccatgtgcttggtgatggagctctctgaagcgccgattaccttctttgtaccggtcggcatggccgtggccacgtcgtcgttgatatcaaagtggttgctgagtcgtaagtaagtaaatacatatattctggctcccctctctgaggggagctgccccggtcgaaactcccctcagccgcctatggcgacggctcccctcagagaggggagccgaggtaaagaaagctatgtcagaaaatacagaaattcgctcggcacttgaattgcttgccgctgagccgctcactgagcagattgactactatcgaaagccattcatggtgttatgggccgccattcaggaggcagccagcgatgtggccgaagactacgacttacctgcggatatggcccaattatgggtggccgaacagatgcgccaagtcgccgattcactggtcgatcggctcgcggaaaaagccgtggcccatggtgccagcaagtccaacgtagcgcgagccgccggtgccagccccgccaatgccgcccgtcgcttcccgcgtctgggcgacgatgccgcctcccagacccgcctcctcattgacgacgtcctcgacaccctcgaataaaccgaaatccctacgctgcccgccaaaaagcacgcgaaaagccgccttcagtcgcttcaaggcggtagtctgaacaatgttcgagtaattagaaggagaatcaaggtgagcaatacctttgcgaccttgccggtcatggcgggcgatgacgtcccggccggccccgtcgacccgattttcaaccgtctgctcaaagaccgcatcatctggatgggtgaagaggtcaaggacgatatggccaaccgcatctgcgctcagctgctgatgctggccgccgaagacccgaagaaggacatctggctgtacatcaactcgccgggcggctccatcaccgccggcatggccatctacgacaccatgcagctcatcgagcctgacgtggcgaccgtgggcctgggcatgtgtgcttccatgggccagttcctgctgagctccggtaccaagggcaagcgttacctgacctcgcacgcccgtgtgctcatgcaccagccttccggcggcatcggcggcaccgccactgacgtgcgcatcaacgccgagctcatcatggacatgaagaagaccatgagcgagctgaccgctgagcagaccggccacaccctcgaggaaatctaccgcgacaacgaatacgaccactggttcaccgcccaggaagccctcgactatggcttcgtggacaagctcgtgaccacgccggacaccatcggcaacaaccagcagggggagtgagactcatggcaagtgaagaagcaaagttcgccgcccgtgccgaccgcttggccggccgtcagggcgtagccggtttcatgccggcctccgcccgcgcagcccagcccgcgccgaccaaccgttacatcatgccgcagttcgtggagaagaccccgtatggcatgaagacccaggacgcctactcccgcctgttcgaggatcgcatcatcttcctcggcgtgcaggtggacgacgcctccgccgacgacgtgatggcccagctgctggtcctcgaatcccaagatccgaaccgtgacgtgatgatgtacatcaactcacccggcggttcgatgacggccatgaccgccatctacgacaccatgcagtacatcaagcccgacgtgcagaccgtgtgcctcggccaggccgcctccgccgccgccattctgctggcctccggcaccaagggcaagcgcctgatgctgccgaacgcccgtgtgctcatccaccagccggccatcgaccaaggcttcggcaaggccacggagatcgagattcaggccaaggaaatgctgcgtatgcgcgaatggctggaggagaccctcgccaagcacaccggccaggacgtcgagaagattcgccgcgacatcgaagtggacactttcctgaccgctcctgaagccaaggaatacggcatcgtggacgaggtgttggaacaccgccagtaaaacttccggacattgcaataccctcggtcggcaacgaccgggggtattgtatttcaaggatgacaatgataatgcgcagcgtggcggttcgacggtgcggcgtagtcggcaaaggagaatcatgggacgtgtggtgagctacaacgaggacgtaccccgttgcacgttctgcggcaaaaccgaacatcaggtacgaaaactggtggccggtcccaatgcctccatctgcgatgaatgcatcgccctgtgcgtggacatcatctccgaggagcgtgtcaaagatgccgaggtcaattcgctgagcctgcccaagcccgctcagatcttcgattatctcaaccgctacgtcatcggtcaggagaacgccaagcgcgcattgtccgtagccgtatacaaccattacaaacgcgttaatatggagcttcaggagtccgctgagcagcttgacgggaataacgggcacagtggccagaccggcaaacaagccaagcaatccgctcccgcccagacgcgtgctgcccgccgcagcaatgaccctttggctgacgtcgaggtcgccaagtcaaacattctgttgctcggccccaccggcgtgggcaaaacctatcttgcgcaggcgttggcccgcgtaatgaacgtgccgttcgtcatcaccgacgccaccaccctgaccgaagccggctatgtaggcgacgatgtggaaaccgtgctccaacgtctcctccaagctgcggatggcgacgtaagccgagcccagcacggcatcatctacattgacgaaatcgataagatcgcccgcaaatccggtgagaacacctccatcacccgtgacgtgtccggtgagggcgttcagcaggcgttgctgaagatcttggaaggaaccatcgcctccgtgccgttggaaggcacgcgcaagcataaggagcaggacgttgcgcagatggacacacgcggcatcctattcatctgcggcggtgcgttcgtggggctgacggacattgttcgcaagcgattaggccgtcgagagaccggcttcggcgcgaattggcacgacgccgacatgaaagacgaggaattgctcgaacaggtcaatgccgatgatctggccgagttcggactgttgcctgagttcatcggacgtttgccggtcaccagtgtgctgaaggaacttaccgtagacgatctgacggcgattctcacccagccagccaacgcgctgatcaagcagtaccgtaaactgttcgccgtcgacggcgtcgatctgcaattcacagaacaggccattcgggcgattgctgatatcgctatcaagcaggggaccggcgcacgcggtttgcgttcgattatcgaacgtacgttgcaggacacgatgttccagttgccgagtttggatgatgtgaggcaggtgattgtggacaaggcgtccgtagagggttccagcacgcccaaactcctgcgcgaagccgtggatgtgccgcagggacgtctcaaagttgcgcagtcggttttgcttgaccgagtccgtacacacgaggcgtgaggccagtaaatacgccgttgcggtagtggtcgggatggtgcgactcgccgcaacacgccgagttgcattcagctgaacggcgtgtattatatatcgagttgtctgaaagacaacatgcgccagtagcccagcggattagagcagctgactacggatcagcaggtcgcaggttcgaatcctgtctggcgcactcccgaaccacggggacaacagtggtatgcgccagtagcccagcggattagagcagctgactacggatcagcaggtcgcaggttcgaatcctgtctggcgcacagtaagcctcgaaagcgaaatgcttccgaggcttttccaattgtattggcccgtttgagtcggttgagtcggccacacagggttgggctaaggttgcccttcgcgactcagcccggagcggaacgtcctgagatattccgtactattacatacggttcatccaagagagtgcagcaaggagacgcgatggccacgaccgccggcgcgaagaagggactttggtccaccatcaggcgaatcgccgcctcagaccgtatttccggactcatcatgcttggcttcgcgctcaccggcctggtgctcgcgaatctgcccgccaccgcgcatgcgttcgagaccgtagcggaaacgcatctgttcatcccctacaccaatctcgacctgcctattggccactgggcccaggatggtctgcttaccatcttcttcctgaccgtgggcctcgaactgaagcaggaactcaccaccggctcgcttgccaatccgaaagcggccgccgtgccgatgctgtgcgcggtgggcggcatgatcgccccgcccatcctgttcctggccgtcacggcattgttctctcagcttgggcctggtgaacccggcacgctgattctgaccaccaccggcagcagcatcccgttctcggagatgtcgcacggctgggcagtgcccaccgccacggatatcgcgttctcgctggccgtgctcgccctgttcgccaaggccctgcccggttcgatccgcgcgttcctgatgacgcttgccaccgtcgacgacctgctggccattattctgatcgccgtattcttctcctcgattaacgcctggtattggttcatcggcatcgccgtatgcgccgccatctgggcatacctcgtgcgactgaaaaaagtgccgtggatcgcggttggcatcgtcggtatcctcgcttggatcatgatgttcgaggcaggcgtgcaccccacactggccggcgtgctggttggcctgctgaccccctctcgtgaaatgcacggcgaactctcgccgcgtgccgaacgctatgccaacaagctccagccattctccgcactgctggccctgcccatcttcgccttgttcgccaccggcgtacacttcgagtcgatgagcccgctattgttggcctcgccgctggtcatcgcactgattgtggctttggtggtcggcaaacctctgggtatcatcaccaccgcatggctgtccacgcatgtgggcgggctcaagatggccaaggggctgcgtgtgcgcgacatgattcccgctgccgtcgcctgcggcattggcttcactgtgtccttcctcatcgcttcgctggcgtacaagaacgcggaactttccgctgaggcgcgcttcggcgtgctggtggcctccctgatcgccgccgcgatttccggtgtgctgctgagccgtcagtccaagcgattcgagaagaccgcagccgcagcagcggctgatgcggaggatgacgaatcgattgatggtgatggcatcgggcagccaagccacaccacagagcccaccacgcccacggaacaccccggcaccctcgccgacggcaccgccagtgtggaaatcgacttccgccactgatggcttagacggtccctactccattgttggccttgtttcgtgaaaaccgtacgctgagacgcgctcagtgtacgttcttcacgagatgaggccttatttcgcggaaaacgtacgctcagtgtcactcaccgtacgttcttcacgaagtcaaggatgatttcgcggaaaacgtacgcagagcttcaggcgctagaatgcgaagagtcgatagcgccgtacaggaggacattggatggcaaagaagcagaagaaatccaagaagaacgacggcaaaaaggccgctgaagcaaagaatctagccgaggccgcatccaagtccgcagtcgtggacgatatggaaccattggaagccacagccgcgaatgatgcggcggcgttggaggctgagacggcaactgaggctgcggccacaccggtgaacccggtcgatctggaggacgtctcgccgctgggcgatacctatcatcgcggcccggtgattctacgcggccagatgattccctcggacaataccaccgccaatctgctgaaacccgatcaggacaccgactggctgcacatggacccatggcgtgtgctgcgcatccaatcggaattcgtggacggtttcggggcgctcgccgagctcggacctgcggtctctattttcggctccgcacgcacccagcgcaccgaatcgatctacaaggcggcccggcgcatgggtagccagatagccaagcgcaacatcgccgtcatcaccggcggtggtcccggcatcatggaagccgcgaataggggagcggcactggctggcggcaaatcggtgggacttggcatcgaattgccgcacgagcaggggttgaaccagtgggtgaacctcggcatgagcttccggtacttctttgtgcgaaaaaccatgttcatcaagtattcctccggcgtgatcgtatgcccgggaggcttcggcacactggatgagatgttcgaattattgaccttggtccagacccacaaggtggcgaatattccggtggtgctctacggcaaggaatactggcaggggctctttgactggctcaacggtccggtggccgagcatggcatgatctcgacgatcgacccgaaactggtcaccgtaaccgatgacgccgacgaagccgtggacgtggccgtcagcgcaattgtgaggtaagcgagatagagtggctcccctctccgaggggagccaaggacagagttactttttgtaggcgatgagcaggccggtgccgtcaggggtgagcgtggactcgaaaccttcgtcatcttcgacggtggtgagcagctcacgcatggcgatggccttgtcgctgcggtcggccggattgatcacgccgccctgaccgtcctccaacgccagcacatcggtgaacacgatcacgccgtgcacgcgcagcagacgggaggcctgggcgaacgtggcggcatagttctcggcgtcgcccgccaccacgatcagatcgtaatcattggcgttgaggcgcggcagaaacacgctggccggggcgttcaccgcacgcaacgtggtgtcggtctcgtcctgcagctcggcgaacgccttgcgaatcagcgcgatgccctgggcggtggaatcgaccgcagtcagcaggcccttgttatccagtgcatgggcgagctgcaaggtctccaccagcgagccggtgcccacggcaatcaccgaagcggcgccggtgatgcgcaccagcatgcccagcagacgggcctgcgccgccgaaccctgcaactggccggactcgtcggcggccgtacgggtgtcggtcaacgcatcggattcacgttcgcgcgcgtgttcctcggtgaattcccatgccttggcgaggttggtgtactgcgttctgtccataattcgttctttcatgtcttctctcgtgcgggcacccagcggatgcatcgacgcatgtgcttaggcgatcgccgcagccagccgcggcgcggcttagcgctcgcggaccttagccacgatctgccacatctcctcgcccacatcgatgccgcgcgggcagtggcgggagcaggcgcgcacggactggcaggcggccacgccgtcggcggtgtcgatggcatccatacgctccatggccttggtgtcgcgcgaatcgttgacgaaacgggaggcccaaatcagcgcggccgggccgatgaaggcgtcgccgccggcgtacaccgggcaggcgccttcgcacacgccgcaggcgatgcagttgctcagcagctcgtatttggcgagttgttcggggttctgcaggtattcgaacacgtccaccttgccttcggcggtggtggcgagcacgccgtccgcctgaagatacggggtgagcttcctgatctggttgagcatagggtcgatgtcggcgatgaggtcgcgctgcggcgggaagccgggcagggacgccagttcgatgactcccagcgaaccgtttgcggctgagttctgggcggccgccgcgtttgcgacgttttccgcggaatcgtcggattcctcagcctcggtgccggtgtgtcggaacccttcgtcatcgacttcgggcatggcgccgggttgcttggcccaatcgcggatggtggctgtgcacagcagggtgggggtgccgttgatggccacggcgtccgaaccgcacatgccatgaccgcacgaataacggaaggccagcgtcgggtcgacggtgcgtttgatggtcagcagacaatccaacacagtatccgaagggcgcgcgggaatcgtgtactcctgcacccactgcttgccgcgcggacgacggcgcgccgccgaatccgagccgccgccgaacggggagcctttcttggcaaacgggctgccaccgcgtgcacgttcggcacgctcgggtcgcggcgtgaaacgatgcacttgcagggtaaccgtcgtgttgctcgcctcagccatgttctgcctccatgaaacagtgggatgtcaagtccaatattagccaacctattgtgccacaagccctaggcggcttgggtattaccaccagcggatcagtactcgcgcttcttgggcggatagtcggtgatgtgcaccggcttgaaacttaccgaaccatcatcggcgaccatcgagtgagcaaggaaatgctcatcgtcgcgttcggggaaatcaaggcgttgcatggatccgcgagattcctgacgggattcggaagcgtgcagcatgacctcggccagttcgatcagatgacggacttcccagatggcggtgacctcctgattgaaagcggcggtcttgtcatgggcccgcaaggtatcggcaaccggtgtgatgtcaccgttgatctgggtcaacgccgtatcgatggtctgagcggtgcaacgtacggccagagcctgctccatcactgatccgagttgggccatgagctgataaggattggcggtgggcactccatcgtctgaatcatctattggcccggcgagcagttcgtcaagctccgctttgcgagaatcggcagcctgatcggcggcatcggtcagcatgtcatcggccgaatcatcggccatgggggagtcaaccgggttctcggcgatgcgtgcggccatcgtctgaccagcgcgtgtgccgaacaggcaggcgtcgagcagagaattgccgcccagacgattcgcaccatgtacggagacacaagagcattcgccagcggcgaacagtccatcgactacctgcacggcaccgtcggcccaacggtacacctcgccgtcggtggtgatggggatgccgcccatcgtgtagtgtgcagtgggcttgatgggtactaggtccttggccggatcgaggttcgcgtactgctcgatggtttcgaccacctgcggcagcacttccttcatacgttcggggtcgatgccggtcatatccagccagacgcagtccttcggaccatccgggtccttcgggtcggcgacgccgcgaccggcgtcgatctccgccatgatggagcgggagaccacgtctcgtgcggccagatccttatgctccggagcgtagcgttccataaacggctcaccgtcggcgttcctcagaatgccgccctcggcgcgggccgcctcggacagcaggatgccggtgtgcgcgagcccggtggggtggaactgcacaaattcgatgtcctccagctgcagaccggcggccaaggtcaaggccatgccgtcgccggtcagatcccaggaatttgacgtggtgtggaacagtcggcccgcgccaccggtggcaagcagcacgttgcgcgcgtggatggcctgaatcttgcccgaatgcgtgtcaaaggccacgatgccggccgcctgcttgccgtcgtcggcgagcaccaggtcggtcacataccattcctcggcgaactcgacgccggcggccacgcactgctgccacaaggcgtgcagaatctggtggccgatgcggtcggccgcataggcggcgcgcttgaccggggcgccgccgaactcgcgcgtgtggccgccgaaccggcgctgggcgatatgcccgtcctcggtacgggagaaggccacgccctgacgctccaggttgatcacggtctgcggcgcgtattcggcgagcagtttggccgcatcctggtccaccagccagtcgccgcccttgatggtgtcgtagtaatgccagtgccagtcatcggactccacattgcccaggctcgcggcgatgccgccctcggctgaaccggtgtgcgaacgcagcggctgcagtttggagaccacgaggatcttcgggtccacgccttgttccttgagctcggtgatctcgggggagcgcagcagtcccaacgccgccgacaggccggccgctccggcgccgacgatcaccgcatcatacatatcttccaaacgtttcggactcatgggttcgattctcgcacacccgccgaacagccttcgagccgtgtcatggaagccgattagccgacacggctgctcagcttgagtatgccggcatcccgctcgatcactcccttcagctccaatgcgccgagtagctcaagtatggtgccgatattgggaatctcgtcgggtaccgtctctcgcgccacacgcaatagtgcgtccggggtgacgatgagatgtcgtttacggcattcacgaatcaatgccactaatgtgcgttccatttccggcagcttggcgataatgatacgttgttgggcttccttctcgggatcgggcttcggcttgacacgaagatccggcatctgatgtgacgagggaagctcttcacccttgcttttgtcgttaccggaatcggcagttgcgctcgccggcccatccttggattgagtgcgcgtaggctgagtatgcttggtcttcgaacgtttcgaatgacctgaatcttgtgacgactcctgtgacgccgatgattccgaggatgctggcgataacggagtcgttgccggcacttccatggcctcctcgttttcggacgagtcctgacctgtggatttcgatatgcctgggcatgctgccataacgggcttatgccgttcatggcatatatcctcggtggatgtggcggcacacagaatcatcgctcggtggtcgccgatcatcttattgcacccggcgttgcaaggctgattgatgtcaccgggaaccgcatacacttcgcgcagcaattcgcatgcccatcccgcggtgttgagcgctccggaacgcaaccgggcttgcgtcacaatcaatgtggaagacatggccgcgataatgcggttgcgaagcagaaaacgacgggcttcgggaatcgtcccggggcacagttcactgatcagtgcaccaccctgcgcctcgatgcgttcgaacagcgtgcggttacgcatcggtccgatatggttgagcccgccggcgaatacggcaacggttttgcccacattggcgggcattctgccgtgcagcgcattcaacgctccccaatgtgccgccgcatccgtgcccatcgcgcctccggacacgaccagatgcccggcaacggctgcctgttcggctacggtgtgtgccacataccggccatattcggtcacgtcccgtgaaccgacgatgccgaccggtttggcgcaactggtcaatgcgcgtggatcgcctttgatccacaaacacagcggtggcgcccaatcggagcgaatggacaggtcggccaactgcgagggccaacatggatggccagggccgataatccattgcatgccatccatagtgaaccagtcggccagttggatgatgtcttgcgagggcaggtccatcatgcggttatgccagcaggccagtgcattgcggaaggagcgcatcgcgttcgccgacgccttgcggccccatcgagtgaggccgtccacgaacatgcggtcaatacgtgacagcgccgggccgcagatttcagatggctggcttggatgggattgcgccaacgcatgccagagggattcggcgttttccgcgcctttgagcgtggcgtacatcatcacatccgcgccatcaagacagaacgtgagcgcggcacgatacaacgtatccgtgggaggtacgggaatagtgcgcgaaacggcgagactcgtatcggtgtgatccacacttcctgcggtgccgccagattgccggatatcagtagcgttactcatgtcatcctcgttctcatttcgatgccctgatggacgtcctgttcagtgggggatacgcggccggccagatcggcgagcgtccaagacagacgcatggcgcgatcagccccgcgcaatgtgagttgatgattggacagggcccgattgaccaattccatcgctttcagcgatgtattggcgtgcagccatttgcccgaagcttgcgcgttgcacacccatccatactgtctgaaccggtctttggccacttgacgggcacgaatcacacgagcttgtatcccggcactggactcgccgattggctcgctttgcgcggcaatgcgcgagactggtggcaccgccatctgaatatccacacgatccagtatcggtccggacaatcgcgagaaataacgtatacggtctttttcccggcaagcgcaacgttcgccggtgccgtaatagtatccgcacggacaggggttggccgccatgatgagttggaatgaggccgggtagtaggtgctgccttttgaacgggaaagcgccacatacccggattccaatggttcgcgcaacgtctgcagggcgcgtgcgctgaattccggtgcctcgtccagaaacagaatgcctcgatgcgcgcgtgtgattgcgccgggaacggcgatgccgctgccaccacccaccaaggccgccgtgctggcggtgtggtgcggtgcctcgaacggcggcatgtcggtgatgccgtactgaggcagtatgccgcacagcgatcgaatcgatgccacctccagctgttccgcctcgttcaacgggcacatgatgccgggcatacgtgaggccaacatggttttgccgctgcctggcgggccggtcatgatgagattatgcccgcctgccgccgccacttgcagtgcccatttggcatgctcctgacccagaacctcgttcatatcgccacaatcgttgggatgacttgtgggcgattgatccgtggtggtctcgtcggtaaccggtgtatcgggaatcgtataggtggcatcgccgcccatcagttcgatgagctcacccacatgcctcacgcccactacatccagtccatccaccatcgaagcctcgtcaagattgcgatggggaacaatcattttgcgcacgccacgttcctcggcatgcagcatgatcgggagcagcccatgaatcggcagcaccgagccgtcaagattcacttcgccgagcacaatggtatcttctaggcaatcatgccctatggcacccgccgcacataggacgctggccgcgatggccagatcatgcgacgaaccgcgtttgggcatggccgcagggctcatgttcacggtcacacgggtttgcggccaaccgaatccagtggcttgacacgctgatttcacgcgctcgcgggcttcggacaacgatgcatccggcaatccgatgatgctgaagtatggcaagccagggctgatgaaagcctgcacttggacgatgaaggccttaaggccgatcagtccgactgagagggtgctgccgatagccatgtctactcctttcacaatgtgtttcgcaacgtggctgtttttttttggggggggggcttcagaaggcattttcaatgtgatgcacgagcggcctgcccacccgaagcacgatggtgacgacatcgaaacggaccgccgaatgcggcacccgattacgccggtcaagtagccaatcgcaggcggctttcctgagattgtgctgtttcgccggcgtaatggcctcttgcggatatccgtaatgcatggaccggcgtgatttcacttcgacgaacaccaccgtgtactcgggattgagcatcacgatgtccaattcgccgtaacgggtatgccaattgcggctcaaggtcgtccaaccgtgttcctccagccacgcggcggcatactgctcgccgagcgcgccgaactgtttgggcgtcagattgcggtcgcccatcgtggccgcaatccgttccgaaggcagcattgcctgcggatcaggtgaagccagcatgggctggtgaaaggcaagaccggcgtcgatgccggacttcgtcgtcggctgggtaggtggtaaagcgttcatgattccactgtgcgggttacttatgtaagagcacaagcgcaaccggcaaatgtggatactatgacgcggtttggcgtgttgtggataacgtgtggatgaaaacccggttatccaccattagttcagaaggtttaccaaggctcaccagtcgacttccctgtgacgaaaaacaacccatcggattgttcgctgaatacgtcagacccagtgagcggagaggggagccaaggtgcggtcacttcaccaaatcggtgagttcgccaaggttcagttcgaaactgacgccacgatcctcgaaatgcggctggttacgggtgctgaccatggcgtggcgcacgaactcaccggcgatttcggccgactcggccaggccgcggccggccatcaccgcgccgcacagggcagaggcgaaggcgtcacccgtgccatgaatcatgtatggcaacttctcatgagccagctcgatcttgccggcaacaccagtggaagcgctggccacatagttgacgattttgccatcgccatggtcgatgcccttcagcaccacgttcttggcacccaactccagcagagcaccaagcagctcgttaaccgtggcctcatcaatatcttggccaggatagtcacgcttggtgagaatgctcgcttcggtgaggttcggcatcaatacgtcggcgccatcggccagcgcgcccattgcctcgcacagctccggtgtgtacgtggggtacatttcgccggcgtctcccatcaccgggtcaaccagacgcagcgcgttcggatattcgcggtagagacgctgaataattgccacctgatcgggggagccgaggaagcctgaatacacgccatccagctccacgtcttccttctgccaggcatccaagtaaccggagagaatatccgtggtgtcatggaacgtgaacactgcatagcgcgtgtgcgccgagaacagggcggtcggcaccgggcacacatcgcagccggcggccgagagaatcggaatcgcggcggtcagcgagcacttgccgtagccgcacatgtcgtgcacggcggccacgcgcggaatatagttcggatcacggtcatacagtgttacatcggtcatgtctgttcgaatcccttcaccatgttggcggaataattcattggcgatgtttgactgtagtcgttcgtcatgtaaaccatgtaaccgggcggcagaaaaatgaaacagacgtcatcaccgagcgggcaaaccgtcttggtgacgggtggaacaagcaatcatcacggacacttgagccatgcgcgaaaggcatggcagcgatatcaccgtgaccgcagtcgaccttgaaagcgcatgcgtgcggcccggcgtgtcgcgataatttcaacgactttttcgtgacttctgacagtcgctcacgtcaatgatcccaaggctttataagcccttataggcaagtccgataacgttcagcttgcgccgtgcggcccaagcgtcgtaacttcataaccaacacctcgccaaccgcccgaacacggcaggcgggtggcaaggaaaaatcctcgcgacctagcacaaccaaggagaataccatggccgagaacaacaagaagtaccgttttgaaaccctgcagctgcatgtgggccaggagcaggccgacccggccaccgattcccgcgccgtgccgatctaccagaccacctcctacgtcttccacaacttcgatcacgctgaggcccgattcggccttgccgacccgggcaacatctacggccgtctgaccaactctacccagggcgtgttcgaagaccgtatcgccgctcttgaaggtggtaccgcaggccttgccgtcgcctccggtgcagccgccgtggaatacgcggtgcgcaacatcacccagtccggcgatcacatcgtcgccgccaagaacatctacggtggcaccttcaacctgctgcgtcacaccctgccgcgtgacggcatcaccaccaccttcgtctccgccgagaatccgcaggagttcgaggacgccatccaggagaacaccaagctcgtctacttcgagaccttcggcaatccgaacgccgacctgccggacttcgaagccatcaccgccatcgcccacaagcatcatctgccggtgatcgtcgacaacaccttcgccaccccgtacctgttccgcccgctggagcacggtgctgatgtcgtggtcgaatccgcaaccaagttcatcggcggccacggcaccaccctcggcggtgtgattgtggaaggcggcaacttcaactgggccgaagtgccgggcaagttcccgaccctgaccgagccggatccgtcctatcacggattgaacttctacgaggccctgggcggatccgcgttcgtgacccgcatccgcgccatcctgctgcgcgacaccggtgccaccctgtctccgttcgccgcattcctgctgctgcagggcaccgaaaccctgtcgctgcgcgtcgaacgccacgttgagaacgcgctgaaggtcatcgactacctgaagaccgttccggaagtcgagtccatctcccacccgtccatcgaaggccgcaaggacaacgagctgtacaagaagtacttcccgaatggcggcggctccatcttcaccttcgacatcaagggcggcaaggacgcggcacgcgtgttcatcgacaacctgcacctgttcagcctgttggccaacgtggccgacgccaagagcctcgtgattcacccggcctccaccacgcactcccaggagacagtggaggagctcgaggatcagggcatccaccaaggcaccatccgcctgtccatcggcaccgagaacatcgaggacatcctcgatgacctgaagggcggcttcgaagcccttcgcgcttccggcttggccaagtgaggtcgacaggaaggttgacggcccgatgagaaggggcgcgatgctaatggggtgcatcacgaatcatcgagccgcatggggtgccttccgcctgattgcttgacccaaggaatagaaagctcgcactgatgtcatgcagtgcgggctttcttgcgtctgtatgcctcacactgtttgcgcagaggcatgaatagtgtgagacctgagacgacataatcctcaaggatgagggccggcgcgtggccgaccgcccaattcagtctggcgcacgatggggcgcgccgttatttcttcataagttggaatcatcatccgggcataaggcccggccaaatatggagagacattatgaacgtgcagaacccggccgcatcgcgcggcatcgctattcaggccgtcgacttggtcaagaactacggcactggcagcaatatggtccatgccctgcgcggcgtgaacgtgagtttcgaacgcggcaaattcaccgccatcatgggcccgtccggctccggcaaatccacgcttatgcacacgctcgccggcctcgactccgccacatccgggcatattcttttcggcggggcagacctgacccgcatgaacgacaagcagctcaccttgctacgtcgccacaagatcggcttcatcttccaaagcttcaacctgttgcccatgttcaccgccgaacagaacatcctcatgccactgactctcgccggagacaagcccgaccacgcctggttcgacctgctcgtcgataccctgggactgaagcagcgcctgaaccaccgaccgaatgaactgtccggtggccagcagcagcgcgtggccatcgcccgcgcgctgattaccaagccgaagctggtgttcgctgacgagccgaccggcaacctcgactccgtctccagcgccgaagtgctcggcttcctgaagcgttcggtcaacgaactcggacagaccatcgtcatggtcacgcatgatgcggtcgccgcgtcttacgccgaccgtgcgctcgtgttcgccgacggccagatcgcggcggacgtgaacaagccgacagcagaccagatgagtgaactgttgatgaaggaacgcgaagccgccacaatgaatgcggcttccgcgagacattcccactaaacgcactgtagaagcattcgaagaagggaacagaattcaccatgtggtccatcactttgaaactcatgcgaaaaaccaagcgcatgctcatacccgcaggcatcgccatcatgatcggcacggcgttcatcgccagcaccttcctgttcggcaatgccatgaacgactccctgacacggcggctgaccgccatgttcggaaacgccaactatgcggtgaccgtcaacagctccgacctgagcgatgaggaactcgacgaggcgtactccagcactgtcggcgacttccatctcgaccagatcgccggcatcgaaggagtcgacggcatccgcgcctcggtggaaaccggcgccagcgtttccaagggagacagcaccatcagcggcgagatcatctccaccgcggcacagaagaacatgctccccgtgaatatcacggaaggggaccagccgaaggattccaacgaagtcgcgctgccggaagacatggcgaaacagctgaacgtcggcgttggcgacactgtaagcctgacctcccgatatgaggtaggcgccgatggcaaagccaaggcggacaacgtgcgcgtggtaggactcacatccgatccgaacggcgcctactcgtattatggtggtgcgattgtaggatccaacaatctgcttgccgcaatgcagggaacggacgatttcaacgccaccggaacaacaatggtgtatctcgaccttgccttggatggaaacagcgtatccgcaaaaaccatcaacggtgtgaaagcgttgctgccaaagcatttcgatctgatgtcacgacagcaaatcagtgacgaaagcatcaaatccttaagcggcaaccaaaccaacatcgccaccacattccttatgtgcttcggcgtgcttgccatgttcgtggcggcactggtgatcgccaacacgttccaagtactcgtggcgcaacgccgccgcacactcgccttgctgcgcaccatcggcgcgaaaaaaggccagctgtatggttccgtgctgtccgaagcggcagtgcttggcttcgtcgcatccgtgcttggcgtggtgctgggaagtctgctcatgtggggcatgtgcgtcagcgacatcatgcaagagggtatgcgattcaatttctcttggcaagccgccgtcgtacccattcttttcggtattgtggtgacggtgctcgcatccttgggatccgcacgttccgctactgcggtgacaccattggaggcattgcgcccgatcgaactgaccgacaaccgtcgttccagcctcacgcgagccataatcggtattctgatggtggtggtcggtatcgccatggcagtattttccatctggcaggtacaagccaccaatggcggcgaggaagcgaacagcgatcaattcacgatgattctgctcatagccatcgccggtgccgcactggtgttcctcggcatggtagtcaccgcggtgttttggatgccggccctcatgaagggcgttggagcgttagcctcgctgacaggcccttccgcaacggttgcgcacgccaacattcagaagaatccgcgacgcatcgcagcaaccggtgccgctctgctcatcggcgtcaccctggtttccaccatcgcaaccggtgccgctagcgccaaagagactatgaatggtgcgctcgccacccgttatagcgtcgacatcgtggccatgggcgatgacatcagtcagcaaatggtcaaggatgtagccgacatcaacggcgtgtccgacacattgtatgcgccggcggtttccgtgaccttggagaaagcggatggaacccagcctacgtccgcattgctggtcggtgtgaagaacatcgatcaggtcaagcaggtcatgcgtgccaacttgggtaacgcctccatcgacagtgatagcgtgctcatgccaacatacaatgcgcaaaccggcaaggaactgcagttcgccaatggcacggctgatttctccaccgaatggaatcaggacggcgtcactacgcgttcgctgacattgcaagcaaaccaagccgactaccgtcgcgtatccgcacagtatggagctgtcggattcgtggatgaaagccatttcaccaatggtgacctcgacgccgccacccatgtgttgctggtcaaggcagatactgacaagtcaggagtttccgttgacggcatctacaacgacatgcaggccgcattggagaagagcgctgatgcgacagtgaccggaccgatcgccgaacgcatcgtatgggcgaacatgatcgactccatgatgatgcttctggtgggattgatcgccgtggccgtgctcatcgcacttgtcggcgtggccaacacgctgtcgctgtcagtgatcgaacgcacccgagaatccgccacattgcgcgccatcggcatgactcgcggccagttgcgacgctccctagcggtggaagccctgctcatctcgctggtatctggcatctcgggcgtattacttggcacactgttcggctggctgggcgcatacgtggtgttcagtatgtacggcaaagtggtgttcccgttcgaatggggtatcaacggcatcgtactcgccgtggcggccgtggcagcactgctcgccagcgtattccccgcacgcagggcagtgagcacgcctcctgttgaggcgctcgccgaagcctaagcttcatagcaaacacaacgaaaaggactcctgccacaaacatggtaggagtcctttttgcgtatcatgcatacgcaaaacaacaaatcaatcagaccaaatggttttcgtaggcgaacaccaccgcctgcacgcggtcacgtgcattgatcttcgccagaatatgtgccacatgcgttttcaccgtcggcaggctgatgaaaagcttgtcggcaatctcctgattcgacaatccatgcgcgatctcaataagcacttcgcgctcgcgatcggtcagttcatctaattccggatcggtgtacgtcgaatcagaagtggaagaagcagtggaatttccatgtgcaccaacattcgcagccatgaaatcgccttccatcattttctcgataagacgtttcgtggcggacggtgcgataatcgcattaccttgaaaaaccgtgcgaatcgaattcagcaacgtttccggttccgtatctttcagcagaaaaccggaagctccagcagtgatcgcagccataacatattcatccaaatcgaatgtcgtcagaatgatcactttggtatgagtgacttctgattgcgttccatcggcagcaaagcgatgctgcaacgcactgatttgccgagtcgcctcgataccatccatgccgggcatacgcacatccatcaacaccacgtcaggatgcagtgtttccgccaacgccacagcctctgcaccatcgcgagcctgcgccgtaaccgccatatcaggttgggacccgatcaccatggcgaaaccggcacgtaccaattcctgatcatcggcaatgaccacacgaatcttctgttcttcactcatactctccaccttatcggcattgttccgctcacagcgcgaaacaaacccttaaatctccctgaaaacttgaatcggctattgagatgcgcgctgcagctgctcctccaacggtgctgcgggcctcaactgcagttcgttcgcgctaccggcatgagcgtcatcgctgaaaccagtctcacgaagcacgccaagcagttcgcgcatacgtttaagcgcggcgcgcccctgttcgccaatggctttgaacgctgtggaaatctcgtcggcggtaggctctttgccttgtgcttcggcgcgatccagcatgcggataccatcgacggcttgactaatcacgctgttcaacgtggcagtgacctcagcctgaatgttggcactgatacggtcacgttccatattcgccgcgagaatgcgctgcttctcctgctcggccaccagcgcttcctctcgcgcctgcaacaccagtgcgtttgaatcactggaacgagcccaacgtgcccacgccataatgccggcgcacagcatcagcactgcaaccgtatacataacgccggtaaagaacgccgccgtattacttgaagtgactgaaaccggtttcgtcaagcctgcaaaagcggcgatggcaccgaacaaggtagtgtatccgtgttgataagccgcgattttcaagcccatcagcaccgaacaggtagcggcggcaagaccggcccaacgccatgcgtgttcacgcccatacaatacggctgaatacagcgcacacagtgacgctacgatatgtccaacctcaatcgactccaaaaacaccaattgcacaaccgacaatacgaacacaataagcgcgcaagtctcggggaaactgcgtcgaagagccagcgccagcaagcagcatgcggcgatcgcatgagagagctgcacatgaggtgaactatcaaaaaagaacgtaatcgacatgcgattcagcagcatgaccaatgccacggcatcaacggaatccatgagcgcataatggtgctgcgtccacgcggaaacacgttccacccaattcagtcctcgtgaattggatgtattggcaagttctacggatttcagtttcaacgatttgagcaaatcatgcagattgggtgcggtgatgcgcaaatgttgcagggcattcgaacgatgatcgcgaccggtcggttggttggtttcctgcgtctgctccgatggttgatctgggattcgcgccgatatgttgacgactgtgtgaggtgcgattgcttcgtcggagaatttcgctttgttggatacggcagttgtgttgcacgattcggactgttccgatgcatactgttcgccggtttcgtctgtcacctgttctttaccgccgtaaggcagggtggccatgacttcgaagcctccgccgagttgagggccagcctgcaacgagcctccggccgattcgatgcgttctttcatgcccagcaggccgtaacctggcgtatgcccgtcgatattggctgccgcgccatgaccattgtcggtgatggtcaaagtgagcaaaccgttgttccatgactctttaatgtgcacatcgacgtgtggccccgcatacttgcggatattcgtcagcgactcctgcactacatggtaggaagctatcgaggcttgttcgccgagttgttccgggctggcggtgccggtgatattccgtcggattcgaatgtcgggggagacgttttgcgcttgttccacaagattgccgatatcgttataatcggcgtgcggtgaacctccgaatactcccagaagacgttgcatgtcatgcagtgcgcgttccgattcgtgtcgaatcgtctccatggtgtttctggccaccgcgggatcatgcgtgcctgcataacgaccgccatcagactgcacgatgatgattgacagggtgtgcgctaccacatcgtgcatgtcacgtgcgatgcgtgcgcgttccgccaacgcggcgatatcgcgttcatcctggtctcgcgcggcgattgcctcattgcgttcccgcatcatgcgaatggttgccagacgggcacgctgccagaacgctacaatgacggtggaaatgatacatacttcgaaaatcggcgtcagcaccagcatggaatgcgccaccatgtcggcgacttccgatatggatgttcctgtgtagatggaaccgagagtgtcttccgtgaccataacgccatttggatttgagtcattccagctgctccatgtatgcactttgcctccggtgagcagtggtccattggtcatggtccatgccaccagcgccgcagccagaagaccgatggtcaacgccagaataatgaaggctttcgtgtttttgggattgccgtagacgatcaccgaatacagcatgaccaatgccagaatatcggcgcccaatatgcaggggccgaatatgagatgcgccaaggtcaatgccacgcagagcaacgctccggtctgtggccaccatcgacggattagcagcggaataagcattgccgcttcccatgtcatctgcgtggaaggcttaaggtcaaacagcaatcccggattataggtgatgccgctggtcacgccgaacagcagaacacctataacaagcgtgatgatgagatcgcctgcgaagacatgaccatgcatccacgacaagagacgctgcttgaaattcgacatatgctccaccctagcgtcagatatgctgtgacgccatcatgcgcaggaatgaaatagcggtaaggtaaagccgcttttgtgaggtaaggttgtccccgcatgtgggtgagatggaagccatcaaaaagtcactactcgcattgaatatgctgatgacgccaaaggaaaggtgaatgcatgacgttgctgagcgaatactacgtgcccggattgcatattgaggatcgttccatcaaggtgccgttggattggacgggtcacgagcccggtcatgggttcgatggcgaatcgattagcctgttctaccgtgtggtcaccgctcccgaacatgtgcatgatgatctgccgctgctcgtgttcctgcagggtggtcccggtggttccggtccgcgtccgctcggtccaagttccgatggttggattgaggaggccatcaagcatttccgtgtggtgttgccggatcaacgtggtactgggcgttcgtctcgtgtcgatacgcatgtgattgagggcatggatggcgacggcaaggccggtgccgcgtttttgaagcgtttcctcgctgattcgatcgttcgtgacttcgagcatctgcgtcgtaccgaattcgggggcgcacgttgggtcacgcttggccaaagctatggcggattcctgacgttgacgtatctttcgctgttcccgcaaggagttatcgccagtttcaccacgggcggcattcctcatgttcctgccgatgcgaccgacgtgtaccgtcatacgttcccgcgcatggcggcaaagacgaagcagttctacgagcgttacccgatcgatatcgaacgtgccgcggtcgtcgccgacattctgcaatcgcgcaaggtcacattgccgaacggcgatccgctcacggtggaacgcttccaatgcttgggatccgatttcggtatgaagccgagtttcgaacgcgtgcattggattcttgaccaggcattccttgacggcgacggttcggcctcgacctcggcggaactgtctgacgaattcctgtcttccgtgatggatgcgacttcatctcgcccgctgtattggccgttgcaggagttcatctacgccaacggtgagctggaagcgccgatttgctgggccgcacagcgcgtgcgcggcgagcatccggaattcgcgggtgacattcgtccgcttaatttcaccggcgaggccatgttcccgtggatgttcgagcaggaacgtgcgttgcgtccgttcaaaccagccatggatgtgcttatggacgacactcatttcggcacgatttacgatgccgatcagttggctcgcaatgaggttccgctgcaggctgccgtctattttgacgacatgtatgtcgactccggtctgcaattcgatacgctgtcccgtgtgggacgatcgcactattggaccaccaacgaattcgagcacgacggcgtacatggttccgtggtgttcaagcacctgttcgacgaggcgttgaacaggggagacctggaagaactgttctgacattcccgaaattctccgaaaccatcgcatccaaaacaattacgtccattagaaaagacgacaaggaggacaccatgtccaatccaaccatcggattcatcggatacggcaatatggcgcaggccatcgccgaaggactcgtcgcagccggcgccgtcgacggtgccgacatcgtggcttgcgccgcgcattacgacaagctggaaaagaccacgatgaaagtgggtgcaaagccattgcacaacgcggccgaagtcgtcgcagcgtccgacatggtcgtcatcgccatcaaaccgtaccaaatcgaaagtgtcatcaagccagtcatcggcgcgattgccgacgaagacaaattcgtcgtatccatcgcggcgggctgggatcttgacaaataccgagacttgttcggcgccgatttcaacgcggcgcatattcaatgcaccattccgaacacgccgatggccgtcggcaagggggtactcgtcaccgaagccgacaacacgctgaccgacacgcaagccgaagtgttcgagcggctgttctcatcgatcagcctcatcgaacgcgttgattccgcgcatatgggcattggcatgtgcatcgcaggctgcgcaccggcattcaccgacatgtatatcgaggcgctcggcgacgcgggcgtgaaatacggcctgcaacgtgccaccgcctaccgtctagccgcgaagatggtggaaggcgtcggtgcgctatacctcaaaaacgaaacccatccgggcgtcatgaaggacgccgtctgctcgccgggcggcaccacaatcaagggtgtgacctcgctggaggaaagcgcgttccgcggtgcggtcatcaaggccgtcgacgccatcgaagcctaatactaagctagggaaccatgtctcttactatcggaatcgtcggactgcccaacgtcggcaagtccaccatgttcaacgcactgacccgcaacaacgtactggccgaaaactacccgttcgccaccatcgagccgaacaccggcatcgtaccattgccggacaagcgtttgcccgtgctggccaagctggtccacaccgaaaaggtcgtgcccgccacggtgaccttcgtggacatcgccggcatcgtcaagggcgcctccgaaggcgaaggcctgggcaacaagttcctggccaacatccgcgaggcggacgcgatctgcgaggtcgtgcgcgccttcgaggacgacgacatcgtccacgtcaacggcaaggtggatccggccgacgacatcgacaccatcaacaccgagctgatcctcgccgacctgcagaccatcgaaaacgcgctgcccaagctggagaaggatctgaggggcaagaagatcgagccggcctacatggacgcagtcaagcaggcaaagaccatccttgaagccggcgagacgctcgacaaggccgcacgcgaaggccgcttcgacaaggattccgtctacgacctgcatctgatgaccgccaagccgttcatctacgtgttcaacgtggacgacaacgagctggccaacaaggacctgcaggctaagctcgccgcatccgtggccccggctccggccgtgttcctcaacgctcagttcgaggcagacctgaccgagctcgacgaggcggacgcccgcgaaatgctggccgacgctggcttgagcgagtccggtctcgaccagctggcccgcgtgggcttcgacatcctcggcctgcagaccttcctgaccgcaggcgtcaaggaagtgcgcgcctggcagatccacaagggttggaccgccccgcaggccgccggcgtgattcacaccgacttcgaaaagggcttcatcaaggccgacatcgtctcctacgacgatttcgtggccgccgacggctccatggccaagatcaaggaggaaggcaagctccgtcaggagggccgcgactacgtcatggccgacggagatattgtggagttcaaattcaatgtttccaagtagggtctttagaccctgcaaaacggcgtgattccaaggggtccggagtgtcggaacgttggaatcacgccgtttttcgatttacggaaaaccgccgttttacgcacgtattccgccgttttacgcggcgatagagtgtaaatagagtgcacttcggaaacaccggaggacactcgccgcaacggttctcgccatgtgcgtggacgctcattgagtgctctcggacacaaggagaacaccatgacggcgaagacctcacggaagacgggcggacggtcgcggcgcacgaagggcgcgggcagcatcatccaccgcgcggatggacgatgggagttccgccgcgagatcagccgggaccccgcgaccggcaagcggcggttcatagcggcgaccggccggacgaaggccgatgcccgcgaacggttcgacgcgaaggtcgccgagatggaacgcaccggcctgctgcccggcgccaagagcccgtacctgaaggattacgcggagcggtggctggaggaataccggctcaacgtcaagcccaccacgtaccgcacccgcgccggcaggattcatgcgtgcatggaggtcatcggctgtatccgcctcaccgagctgacccctgaccatatccgccaatgcatgcgcgtgctttccaaacggctcgcgccctccacgctcaaggaccatttcgtgagcctgaagatgatgctcgaccaggcggaactcgaggagctcatccccgtggatccgtgccgcagggtcaagccgccaagggtggagcccaccgagaccaggatcctctcgccagaccagccgaagcagctgatcgaggccgtgcccaaccggggagcgaaacgacgcggaccggccctgaccgtggacgttgacgaatcctggatgctgctgttcgaactcgcgttcgcggccggcatgagggaaggcgaacgctacgcgctcatgccctacgagctcgaacaacgcgacggcgtgcccggcatcaacgtgcagcagcagatccagcaatacggcaaaccggaggacgccgtgatacccgcctggctcaaagccgagcacctgtacggtatcctgtggctcaccacacccaaaacccacgccgcccaccggttcgtacccatatccacgagcctgtggcaacgattgtgggcgcgcatcaaacgactcgacataggcccacgcgacctcatattcaccaactcacgaggcaaccccgtgcgcagcagcaccgaacgctacaactggaacaaggccttgaaagccgccggcctcccgccggtcaccatccacagcgcacgccactggaccgccagcatgaccgcccgcgccaacatgcccgacgacgccagaaccgccatcatgggccacaccagcatcagcatgaccaaccactacacccacagggacgcggccagtctcgccgcgctcctcgaccgagccatccctgacctgcacgacgagagggatgtgatagacgcgcaggtcatcgaggaggggaaatgacgaacgtgacgcatagtagacttgtccgcatgagcataaagaaagtagacgggccacaggaccatcatcgatttatcgatgaggccggtgacatgaccttccattccgggaagcggggccgcaaaacctcctccatcgggatggacggagtttcccgatgcttcatgatcgggctcgtacatgtgaaaagtcccctcgacgatgctcgtgcgactatcgacggtttttgtgaggagatcaacagcagcaaattcttccagagctttcccagcgtccaaaagagaacaaaggagggatggcacggcttctacccgcatgccagcaaagatcctgcggaactacgctatgaattcctcaaactcatggcgcaggagatcgacttctccgcacgagtagttgtgggccgtaagataccggcgatctatcagcagaggcacaacgaacaaccacgtgaattctacgccgacctcatgtcccatctactcaaatactcagggaagatagatccgttgattctcgacgtcgcggaacgaggcagcagcacatcgaacctcaaccttcagcatgccgtggacatcgcgcaacagcgcagccgtcgcggcacggtaacgcatgaattgcgaaacaccaccaaattcaacgtccaaccgtatgatcacgaaattctcttggcgctcgccgactacagtctatggacggtccagcgagtgtacgagaagggagacgaaaagttcttcgggcttcttgaaccgaagattgtgctggtccatgatgtttatgattccagcagatatttcaaatcaaagaactattatcggccgaaatacaatcctctgaccagagcatccatcaacttcgacggatgggcgcaacctgaatggtagaaggaatagatggcccgtctcaactctagtcgtgctgtgacgacgacggcatgaagccgactttcgatgaaggacaggccaaaatccaataatacgaccagctgatccttcgaggggaaggatacctgtgtattcttgtcgctgatctataaatgatgatagacggtcatgtgggcggcagtcaagaaaatgcgacagattgtctaatcgtcgatatgtcgcagggccgccccggcgctcgcaaagagcgaccggggcggtttcgtgtttagggcttgatccgcccgacacgggatttattgcttggccgtcttgacggtgatggtggtaccgagcgcggtggtctcccagctcacgccgtccgcctcactgtaggtgaagtccttggtggcatcctgcgaggcgaggagcgcgctggccatggtctcggtgtcgccctggctggtccatttccaatcgccggctgcggccggtgcctgataggtgcccttccagtagaggctcttggtgtcggtgccgatccagtcgacctcgatggtgtcgccgctgatggtagcttccatgtatgagctcgggtcgttggaattggtctgcttccatgtgccggtcagatcggccggctggggtttgggctcttccttattggtctcggtctttgacgtgccatcggatttggccggcgcatcggccgtagtgcttcccccgcaagcggacaggccggtaagcaacatcgccgcaacaagcagcgcgattgcctttttcatgattggtctcccttcgtgccggacattgtcgtccgacatgactcaatcatatggcgaaacacaagaaccaaggactcatcccggtgctcgcggtgagtcgtcgggatgagtccttatatggctcggaagctacgcggcgagttccacgggagcccgctcttccaatttggagtaggggataacggcacaccgtagttgcggaacgcggtgagcgcgccgcgctgcaacggcgtctgccggtcgtcgccgatgactatcagccgggaatccctgcgcttgggatccttcttcgtgtcatcccaaccgaacatgatgtctttcacggcgtccttgtcgaatcggttcggtgcctggcagaaccgggtcggatggttgtcgctaggacagcaccctcttctgttctgtaacggcatcagtacaatgttcgtaatgaacagttgttcgcgcaaggaaatgccggcatatggtgcgtcatgttcaaagcatagagattcattatccggcctccacgagaatgatttggttctagcgcaatacatgctttcacgacacatgctttcgtgatacatacgttggtcagaagatattgcgctagaactcagcagtcaccgcacgtggtccacgatgtcgttgaccttggtcatatcgatatcgcgctcgccgaatgcctgccgctcgtaggccaggtcgatgtggtgttcgtgtgcgtaatcgatgatacggcgagccaaatcggcaatgtcgccggacttgttgaaggaacgaccacgcagcagcacgcgttgcataagagggcgcatcgccttgaccaacttgtaccggtctgacttcaccttcaccatccaaccgtcggcaaaatatagcaccacgccttcatgcgggcttgccttggcgtcgccgattgcctgggcgacttcttccggcgaatggcagatcgccaccgtttccggccgcacgaagccgccggcaagagtgaacgtttcctcgtgagcggcatcgatggagaacgattcggcattacgaatcaaatgcagcaagcgcagcccggatgattcgtatccaacgatgtgccggtcggactcgcgatcgatgacttcaaacgccgccgtgacattccactcatgcaacatacgccacaattcggcacgtaccgctgaatctgaaggaaacaggcgctcgataagcgcggaataatccgtttgccccgacttcgaccagaagcggaacaatccaggagttcccgccgcgcccacgagcccgagaaatccgttctccttgcgctcaacgcgcacgggcaacgactctggatgttcttgagcgtgattgacgacttgggcgaacgatgtctcctccgtctcgtccacagcaaagaacttctcgaacccgcgttgcaccacctgaccgttgccgccgacaaaaagccctcgcgcattgatggtgcgatccgtccaccgatgttcacgaaatgcctctgcagtgaaattgcacgcatacacgtctgtttcgccgcgcaccggaataacccgaacgtaagggtccgcgcgcatacgctccaacaggtttccattcggatcgcccggttccaacgggcggaacatcgcggtgtgaaaatgcttccaggacgaacgaatgtaatcttccggaacacggtcagcggtatcacgcgccgcattgcgacgcaacaattcgtctagaggaacgtcaaaatccctcgtttcccacagtgcgccatgacgttgagcgagtagcgccagttcggctgcataccggggattagcgtgttgcgcatccgccaccacatcccaccccgcatccaatgcgtcggcaatcatgtgccgtcccatggcaaccaccatgtcattgaatcgcttgccgtgctcggattgcagtcggtttcggacctgtgccgagccggcgatcatgagccgaatgtcatcgagagaaatcacgcaatgcggccacgtgttggcggggtcctcacaccatgagcgtgcccacgtggacttgcccgaagcgggcagtcctcgcagaataatgagctttgccatagccaagctcctttcgttgtgctgtggggtgagacaggtgccagcgatggcataaggttctgctcgccccaatattgcttgtattatgattcggctgccgaaaccgagccgcctggttcctgctgtgcggcggagtcaatgggcgccggcccgggggagtcgggcatatccagcggtgatacgtgcgttgaatcggtcgcgtgtgcatggaaccagtcggcaatctgtgtttcgcttaccggttgcagattccatgcgtccagtccaacgttgagggcttcgtggcgtgcgccctccggagacagctggtgcgtgtgaccatacagcagacgatgtccgtcgaacggcaatgcctgatcgcggaaacgtacggcatcatccggccagccataggcaagatcctcacggtaggggaaatgcgatagattgacggtctccgttgcctgcgggcggccaattccgagaccggtcagctccgccgtgctgttcggctcaatcgattcgaacagatctcgcgcgggtgcatcgtccagccaccagtcatcgtgattgccgataaccgcgtgcagatgcctgcagcgcagctgacgcaggcagctcttcagatgccggaccgatgttcggtatccgatatcgcccaaaatccacagctcgtcgtcctcgccgacaatccgattgatattggccacgattgcttcatcgtgcgcatcggtgtctgcggccttgcggaaattgagccgggaatcgtcaagcaccacgcccttcgcccaatcctcggcggccttgcgtccctgcgaggagaggagagcgtcatactgcgtgtgcccagggtcgaacgtggtgaatccgcgcagcacgctgaccagcggatgcccgaaatgcgtgtcagtagtgaaatacttcatgatctgttgttctttctgaatatgtgatggtatgcaatgggttttgctgcggtgcattgagttgcgactatgccaagaacgcatgctcgtgcaggtgcgtttatgaggcatggtgcgaacgagtcggctcgatatcaccggcaatgattcagctatgcgccaatgagaggtgtactgatcagatttgtatggcagcgagcaggctgcgcttgtttccggttattggctggaactgagcagtgcgcaaaccctgtttgaaggcgcattcgagcatcgccggcaggttcatctgctgacgcttggcgtgttcgttcacgccgttgctgctgaatgcgatgtgttgaatcatggtgtgcacaccataaggtcttacgtccgaatccgtcaaatcacggtgtgtgaaatgcctgttgtatataaaaaagtccggtgcaacgcacgatgataatgcgttgcaccggacctactgcagaaacaattgttacagactgtagatctgtgcgccgaacggccagagcgcgagcttggccattttgaacgactggatgccgaacggaatgccgatgatggtgatgcagttgagcacgcctgcacccagatagccgagcgccatccagcagccgaccagcaccacccacaggatgttggccaaggcagagccgactccgccgccgtattgcacggttttgccgaacggcgtcaaggtaaggcccgccattttgaacgcctgaactcctagtggaatgccgatgatggagatgcacagaatcagtcccaccaatgcccatccgattgcgatggccaatccaccaagaatgatccacaggatattgccgagaactcgcatgattagtccctttccgattccggtcgattccgcgcatgttcagcttcactattttgccagaaatcatgacggaaacacgagacgcaacccttagctcgcccctgattcatccccggaccgttattcaggcggagcgtatgcggtaagcccaatccttttgtgaagattttgtgtattgtcaggcatgcgtgggtttcaccgtcgatttgaatgatgataggcttctcgatgtctgccgtacgaagaccccatcaaggagatgccatgaacctgtatcgctacgcgatgttcatcgcacgcgcctgccgtgggtcgttcgtcggcaatgttctgtttgccaatccacgaatggccctattctcgatgctggtgtagcggggacacgccttatgccgggatgtaccgatggcccatccgcagtcgacgtcgcatgaatcgctcaccatagccatcaacttacgcaaagccgcgaatcgtttgccgtatatgaatgcggaacggatggcggcttttcctttacgtccggactcatcggtgtcctcgcgtcttgacacaagcatggggccggatcgcccacacatgacgttaccaacagaaggaaatgctgtgacctcacagaaaaacgcggaactcgggtccgccaccagttccgtaaagcctattgatccgcacacccgattcatcgttgtgggtgtgatcgtcgtcggctcgttcatcgcgctgctcaaccagaccgtcatgtcaccggccttgccggcactgatgcgtgatttcaatatcaccaccggcaccgtgcagtgggtgaccagcgtctacatgctggtctcgggcatcatggtgccgatttcaggctatctgattgataaattctccacccgaaagctcttcgccggagctcttgccactttcatggtcggcacactgctgtgtgccgtcgcgccgaatttcatgctgttgctcgtcgggcgcatactgcaatccgccggctccggcgtgctgttgccattggtcgccgtagtgccgatgctcgtctatccgccggataagcgcggcaccgccatgggcatggccggtatcgtcatggccgccggcccggctatcggcccggttgtcggtggtctggtgattgacagtttcggatggcgcccgatgttcattggcatcgcagtcgtgacactggtcatccttgtcggaggcacgatgatgctcaagaacgtcggcgagttgaagaacccaaagctcaacatcctgtccgtgatcctttcgaccatcgcgttcggtggcctgctctatggcttctcgtccgcttccacgatgggatggagcagtccggtcgtcattatctcaatcgtcgttggtcttgtggccttcgtcgcattcgtatacaagcaagtcaagctcgatgagccattgttgcgcgttgacacccttgccacccgcaacttccgcaactccgcgattctggtcactctgatcaacgccgcagtcgccgcaaccaacgtgacgttgcctatcttcatccagaatgtgctcggccaatccgccaccgtcaccggcatggtcatgctgcccgccgcggcggtcggcatcatcctgagtccggtcgccggcgccgcattcgacaaattcggccctcgcggcgtgggtatcggcggccttgcgctcatgaccatctctcttggtcttctcggcaccatcaacaccaggacatcagtgctgtttgtcgccgtgttctgcgcattgcaggcatccggtcaggctatcgccaacatgccgatcaacacttggggcgtcaacgctttgccgaacgacatgatcgcccatggaaacgccatcgccaacacaggccgccagatcgcggcagccattgcgacctcgcttctggtcaccgcagaaacatccatgaccgcctcgcacatgtcccagggtgtgaagtccgccacggccagcggcatcgcgttctcctacctgctgtgcgccgccatctcgctggtcgccctgatcatctgcatcttcaccgtcaccagccgtgccaaggagaaggccgcacgcaacgccaaggcctccgaggcgcaagcctccgccgaagtcgcggccgaaaccactgaaggccagcccgccgagcatcactacgccggcgcatacgtggcccccgccgcctccctgttcaagcaggcccaggaacagtccatcggcggaatcatggacgatcagccctacagctgcctggacagcgatgacatcacgcatgtggtgcgcgagttcatccgcctcaacgtctccagccttcccgtggtgaacggcgatggcaggctcgtcggcttcgtcagcgacggcgatgtcatgaaatcgattgccacctatgaatcccgtacggtttccaccggcaccggttcgacgatggtggtgttcgacgacgaaaccgtggcctccaaggtgcaggcgctctccggcaagaaggtgatggacatcgccacgcgcaaggtcgttgccgccacgcccgaccagcatgtcggagaggtggcccgaatcctcgccaagaagcagttcaagaaactgccggtggtggatggtgatggcagactcgtcggtgtgatccgccgtaagtccgtgatggaacatgccttcgatgcgctgttcccaaaggatgatcggtgattaggcgccatcatcgctgaatagaatgaatggaatatgaggcttcccttctcgcgggggaagcctcattgctttgtccgcggagtcttacggcacctgcgcaagggcaacgtcacgccttcatgattatactattgaatagtgtgttcctatcgttgcatggtgacgctaacgcatggcgtcacgatactgaagcctgccatctaacggcgggtacggctcgttgctggagtcgtgcacgcatacgcgcgtcggcgtgcgtatgccgtgatgtgacctttgtagtggaattgaagaattgagaacactcgtatgtcttctagtagtacaacaactgaaccaactgtgcgcgaaacacccgaggtttccggcgatgacaatgcgaatgcgcgcgcagcggtccatagcgcgaacaaacccggtgccgcctatgccgcagcagtggccaacggggaatccgagcgtgcgtggatccgccgtgtagtgcttctactcaccggccaggcgttctcgctgctgggctccaatattgtgcaatatgccatctggtggtggatcgtattgcagactaaaaccggttcggccatgctgctggccacgttgtttggcgtggtgccgcaggccatcgtctcgatttgcggcggctcctgggccgaccgtcacagtcgcaagttgctgattatgctgccggatatggtgattgctgtggtcaccgtcgtgctgtcgctgagcttcgcgatgggatgggcgagtctgaccatgattttcgtggtgctgttcattcgttcggcgggaggcggggtgcagacgcccgctgtgcagtcgttcataccggatgttgttccctcgggcaaactattgcgcgtcaactcaatatacggcgtgattaattcggtgaatatgattgtggcacctgcggtggctgctgtgcttatcaacacagtgccgctgtggtcgattctgttagtcgatgtgaccacggccattatcggcgtcggctttgtggcgttgatcaaagcgccgaagaagagcacggaacatgttgcgaggcgtatggctgaagcggagaatagcgggcaacccacactcgaaccgatgtcggatgccaatgctgatcgttcgctgattgccagcgtccgtcgtgtgtttgctgacttgaaagatggtttcagctacacatggcgccgggcgaacctgcgcaacgtggtgctcggtgacgccttggtgtgcttcgtggccgtggcgccgatgaaccttacgctgttgctcatgacccgcgaatatgagggcatcgatttgaatctcggattcatcaacctgaccaccgcctccgataaactcgccgccaacgagctgggatggagcatcggtatgctgctcggcggcgcgctgatgtctaccatcggtgccaagctcatccgcaacaacatgcgcgtggtcgccttcggcatcgctctggtgggcgtctccgtcgttggtcttggcgtggttcacaatctgctggcgtatttgctgattgatgtggtgaacggtttggcttcggccatctgcatgggcccgatgcgcaccatcatccagaccgaggccgatgagaagatggtgggccgtgtattcggccttgacaccaccctgagcacgctcggaatgccgctcggcatgttgatcttcgcgccactggccgacgtgatcccgatttcgctggtgttcatcatcggcggtgttctgaccctgcccatcggcatctatctgttcggccaggcgcgccgtaacgtcagtgcgcaggtgacgcgaacagcggcctgacaggcacctgacggccacctgccagacgtaaagtcaactaccagatttgcgcatacagatcgtaagacacatacttcggcagatcgtagacggtaatcgagaatggcgtggatcggccattgcccggccaatccacgaatgcgatatctccatagatgattgcgttctgtgcgttacgcagtactagggaaatcttgatttgctgtccatcagatggcttgaatccatctgccacggcgcggacctcgccattgaacgtcgtgccgccgtccctgttgtctattttggatgttccgctgatggggaaggtagcggttccttgagcctcggtgacgttgtacgtatcagggctaagcacaacgaaatctacggtggccggggccgtgccctcgcccgcttggccggcgtcatatacagtctgattcgggaatgccatattcagtgcttgcgtctgcgagaacacgatggaaccgtctttggcccgccccgtaatggtaatctgcggatactgcacctgctgggtcttactggtgttgtgcagggcgaaagcgtagtggacatacccttgctggtccgccgaccagccggattccactattttcagaggattgtcggtgacggtgttttgattgtctccatcagcgccgtcagtgccgcctactccgcccgtgccattggcattgtcggttcctgacccgttcgaggagtgcccgccatcggccttatcggttgattggctgctggattgtgtcgaggaatcgggtgatgttgccgacccgataatgccaagttggcctgccaacacaatgcctcccgcaatggcggcgattatcagtgccgctccggcaatggaccacagcacgatggcgcgtttgctcaagtgcagacgccggaatagtcgagacgccgacgcgctgccgttcgttgttctcgttgatggcggatttgccgatgatgcgttcggtatgggcggattggactgggagaacagcgcctggcgaaactcttggacgctctgtggccgtttgctgggctcgaatgcgcacgcatagccgatgacggcgcgtagtcgagccggtactgcggcatcatcggcaagtcgctgctcgtagtcgctggcatcgggatatacgccggtcagcatgaatccgagtagccggcccagcgagaatacgtcggaacgcgcgtcggttttggcaaagccatattgctcaggcgaggcgaatccgtaggtgccaagcgccgtggtatcccgtgaacggttgcttgcctctgaccggatgcgcgcgatgccgaaatcgatgagatgcgcgccatcctgggccacgatgacgttggccggcgtgatgtcgcggtggataacgccgtgctggtgaagctcctgcacggcttcgcaaatttggtcgataagctgcacggccacattcggtgcaagccgcccgttttcctccacgatttgcgcaagcgtgctgcccggcacgtaatcgtagacgatgacgaaccggtcgggcagctcgtacgtcgcttccacacgcggcagacgattactctggcaggcgctgagcgccgcccacacattgcgttgcgctagaggagagggaatcttcttgcgtacgaacgggccgttgccgtcaatgctcaccagttcggtgacgccggaaggtccgcgagcgagcgtacgctcgacatggtacgcatcgtcgatgctcatcgcatgcatcgcctgcttatcgtccatgtctctccttgatgccctcttacttgcgtctcactggtgagtgttgttgggccgaatgtcgtcaatcggccggcagcaacgtcgcctctcccatacgatacaactcgtcgtccgtggcaatgcggtcgaatccattgcggatacaccagatgataatcgcgtcacgtcgctgtttgcaccacagttcggaaacacctgcaagacgaagcagccgttgggtttcacgtaatgtgcacttgagaccaaaagccagcataatggcgtgatctcggctggggcggcttttgccggagaaaatgtcataaaccactgtggcgttgaggccggatgcccgcaccacgtcggctcgtttcaggccatgggcttccatacggtcgaacagatagtcggtcagcgtgcgtgcgctgacaagtccctcatcgagatactgctcaatgctggcgctggcgagcagccggtccaacagttcctcggtcaaatgttcttcggggatgtctgccattgcccatgctccttgtcgctgtgttgcgggtgctgtgctgcgccatcgtacgcggttgctcgattcccagcgtacaggacgccgacttttcggaaacacgccgaaaaattcagttgtcagctgatgtatggcccgtgcgtgtcgccgacaatgatcgatgccatccgtgtaggtgcggtggcggaaaggatgttcatgcgcggtatcaagcatcgacaataaagctaacatgcatacaaaatgctaatttgcgtacataataacaacgccatacactggtttcgatgtatcgcagagcaaagcgagcaataagaagggacgcaatgatgagcgaacgataccggcttgccatggcagtcggattgaccgtaacggttgccgggcttgcctcttctgtgctggtaatgctgctgcttaaggaaagaagggcatcatgacaacgccatttgatcaacaacctcagccggttccaccgtccgaaggcacgaatgacgcaccggaagatcgcgcgaatgcgcctaccgtgccgaatactgtaccggctggccaaccgaacgtagcgtctgatggtgctaccaccactccgatggctccggctacggcatcgcagcggcccgccggcgcgccatttgatcgtgtatatgcggtcagtccgcaacagctgttccaagttattcacgaccagctgactactggcgccacgtttaccttggataacgaaaacacccagaccggagcgttttccttccactcctacgatggagtgaactgcacgctaaccgtagtcccgcagggtgcggctgggaccgccattcgtctggaggcgactggaaacgaaagcgccaagcgcgttgatgagttcctcgcctctttgggcaagcgtattggtgtggctcctgcacctgccacacacggtgccggtgctgccgctggttttgctggtgccgctgcgcctgccgtgcttgctccgaatgcgcaaggggtgaagaagacttccaagctggctgtgttcgccattatatggggagtgttgttcgtactcgcccaatttgtggatgtttctggccgatcctggggcggactgctgttcgccacggtgcttccggcactgctctcaggcttcgccgtatacgtgactcgcccgagtggcaaggtgcaaggccgagtgctggcctgggtggcagtcggtatcaccgttgtgggtctggtaatcggtggcgtgtttgtaattcgtgacggtgcgaaggccaaggctgatcgggcggaattggaagcatcgctcgccaccaagtgcgaagcatattcatggccggagtcggatatcgcggcgctgctgccgcagccgaaatccacaaagggtgaaattaaaagcgagtcttcggactatttctccatcgaggtgtgcggtaccgacgccaagcagtatgccgactacgtcaagtccgtgcaagacaacggtttcaccgtggactataacaagtccgctgacagtttcaatgccaagaacgccgatggatacagtgtgagcgtttctcgtgacactgacgacgaaaccatcatgtccatcactatccaggttccggagaagaaggaagatacgtctacggacggcgacgccgcgaagcaggatgataagagcactgatacgggcgctgattccagcgatgccaacaagcagagcgaccagtcttcggatcagaaggcgcagcagaacaccaatgacagtgctgacttcaagtccacgatggacagctacgaggcctttatcgatgagtatgttgccttcatgaacaaatatcagaaatccgataacgtggtcagcatggctaccgactatgccagcatgatgaagcgttactctgagttctcccagaaggtagacgccattgacgaaaactccctcagcagtgaggatttggcctactacaccgaggtcatgactcgatgcacgcagaagctcgcatcggtgggccagtgatcagactggcgtatcgaggtaacggttttccaagaaagggacgatgacggtatatgggtatacgcggcagacagtatacgccaatggatgagccggccttcaacaaggccatccccggaacggaggctctggccgggacactgaaagacacttttagcgcattccgtagtgggcttgggattaccgaacccgtggtttcggtgaattgtgaaggttgtggcgctccgctttccggtcatcgcaaagaagtcgttcgatgcgaatactgcgatcgcgaaacgcagctatagccaacatgccagcataacggccggtcttgcgattgcatagtcgcaagaccggccatgtgcattgagatatcgaggaaaacagatggcagttattaaggcgttcgccggcgcgctcggcggtacattcgcggacctgtggcgtgatatcatcaccgctggtccgttcacggaacacaccgtcgttgtgccgggcattccccgcggaagcaacaacgatcgcggttcgaatgaatacggttccgagggaataatcaccaatggttcgcgtatctatgtgccagagaatactgcggcgttcattttctctgaaacaggtatcgaaaacgtcatcaccgagtcgggcggttatgaatatcgcaacggggaacagagcgtgctcgccggagacggcatcggatcgttcttcaaccaggtcgccgatcgattcaccttcggaggtcagcctggccgcaccaaatatgtggccttcgtcaacctgcgtgagattcgtggcatcaaattcggcacttctgcgccgctggtgtataacgaccggttctatggcgtcgatttagaaattcgcgcacgcggatccatgtcgctaaaggtcactgatccagttcgattcgttcgtaactttgtgcctgccactaccgtgtcgtattcattcgatgatgaagggccacgtaggcagattctgtccgaattcgtacagtcgtttattgtggccatcaattcgttgtccaatgaatatcgtatttcgcaattgcccggcaaggcgaatgacatcgcagcatgcgtgcgtggcgatcgagccaatgccggtacatggaatgatcgttttggctttgaagtgtccagcgtgggcatcgaaagcatcgagttcaccgagcaatcacgtcaactcgtgcagcagttcgcctcgaataagatgaatgttgccgcatacgagggcgtttcccaacaagctggcaatatggctgcccagcagcgcattgcgcaaggtattcaagacaacggctttggcgatggtggcatgttgcttggtatgaatatggcgcaagccatcagtcctatgaccgccgccccggttcaagcgccggcacctgcgccggcaccggaagccgctgctcccgcctctcacacggcatccatgtctgtggaagaacaagttgaggcgatgaagaaattgaaggaattggttgatatcggcattctctcccaagaagaatttgatgcaaaaaagcacgaaattctcggcctgtaaacggtgcattcatgcaactcgaaacagctgataatgagggaaacgctggtgcgacacggacaaaatggtgctcagggcttcgaactgggttgttcaatccgtttcgatatttcggcgactcagcgcttgttcgggccgccgtccgggaacatcaagtaggtgatgatgccggcggcggttccactggccaatgcgccggtgatgacggcgagagcctgcatcgccgtgctgagcgtgggcttgcccgttgcggcagtctttgaagccttcaatgtggcggcactgggcttgcgtttctcggtggcggcgttgtcggcaacgttgccaccgtccgtattgactggggcattgtcggcaacggcctcgccgtcctgctcttgggcgcgccgttcgcgaatgcgttgctcaatgggatcgtcgaccaaagtcttgatgatgcgtgccagatcgcggtcttcacgacgtgcgatctcggcgctgaacaccgtacgtaaagcgagatactgcagtttggtcatcgggcttttgccggtctccaagttagacaccgtctgtcgcgcgactcccagctcgtcggccagttgctgagtcgtccatccggctaccttgcgaatcggacccaggttctcctgaaacttatcaatccaccgttgttcgatttcagacgtcgccattacgcacctccttccacgctgtcaccagtgtacgttacctgtaccgaaatcaatccaaaaaacagtgttcatgtgaaattcactgcgtatttgcgctttcgccggcttaccgagattagccttagacaaggaataacagagtagaagcagaaggtatgcgcgtattcgatttcgacggaaccatctatgatggcgaaagcctgttcgacttgtacctgtattccgcccgccacgacccgaaagtgttccgctatatcgcccccgtgctgcggtacgcggtcaaatacaagcttggccgggccacgcttgaacagatggaatacggcgtgggcaagatgaccgaaggctatctcacggaactgagccgatccaaacgggtggcgagcgtcgaacagctcgtggacgatttctgggaccgatattacgcacgtatcaagccttggtaccagcctgagtcggacggtgtgatcctcaccgcatccttcgatctgacggtgggggaggcctgccgcagactcggcgtgaggaatctcgtggccagcgaggtggatgtggggacgatgaaggtcacgtacctcaacttcagcaccaacaaggccaaacggttccgcgaactgtacggtccggacgtcgtcatcgacgagttctacaccgactccaaattcgatcagccgatgatcgacatggcccggcacgcgttcatggtcaaggggaacaccatcacgcaagtcaagtaggaaacaacagaaaacaacacaacgtaaccaataacgaaaggggaacatatatgagcatgccgctcgatctatacgtaatccggcatggcgaatccgaagcgaacgtcatcgtccaggcgggcgagcagggcgacaattccctgtacacgcaggacaacgtcactgtgcccgatcgctcctggagactcaccgccaccgggcgcaagcaggccgactgcatcggtcgctggctggtcagccagcagcagctgttcgaccgctacatggtctcgccatacgtgcgcacccgcgaaaccgcagccaccatggccctgcccaaggccaaatgggaggagaaccgtgtgctgcgtgaacgttcttggggtgagatcaacaccatcaccaaggacgaattcaaaaacaactacgcgcgcaactggaacttcaagaacaccgatccgctgtactggcgtccgccggcaggcgagtcgattgccgatgtggccgaggaccgtgtgcacaacatcctgacctcgctgagccgcaaatccgattcggaatccgtggtcatggtcacccacggcgacttcatgctcgccctgatgctcaccatcgaggatctggccgacgaggaattcctgcatcgcgccgactcggacgactggaagatcaccaactgcacctgcctgcactatacacgccgcgacccggaaaccggccgcacctccaagcgtgtgcgctgggagcagaccgcccggcccgtgctcgacgagacgaccggccgctgggaggtcaaggtggagccgtggcgcgaattcaagcgcccgtatctctccaatggcgatttggtggatgtggtgcaggccgtcgatccacacctgctggagtattacggcaaatagcctttcccggaagagagacttcacaaaatcttcgtgagctagaatggtgcgtggtgcggctggttgtgaatgccgtgccccaagcgagagcgaggagagtagtaatgtccaatatcttccaatggcaattgcatggcgacggcaagacgctggcgcccggcgaggtagtcgagcccgatgaacgtctgacttgggtgcgcaccgccggtatcggcgcacagcacgtcatcgccatgttcggtgccaccttcctggtgccgattctgacgggcttcgacccgtccaccaccctgttcttcacggctatgtccaccgcactgtttctgctgatcaacaggaacgtgctgccgagctatttgggctcgtccttcggcttcattgcaccgatcaccgcggtcaccaccgccaacaagggcattgcggtcgccagcttcggcatcatggtcaccggtattctgctggccctggttggcgtgctcgtgcattacgccggctccaaatggatcgacatcatcatgccgcccgtggtcaacggcgcgatcgtggccatcatcggcttcaatctggcaccttccgtgtggaccaacttccaagccgcgcccgacaccgcactggttaccctgttggccgtgctgctcgtggctgtgctgttcaagggcttgctgggtcgcctcaatattttggtcggcgtgatcatcggctatgtatatgcctgcatccgtggtcaggtcgacttctccgccatcggcgacgccgcatggatcggcttcccgaagttccacctgccgcaggccgatttctccatccttcccatgttcatccctgttgtgcttgtgcttgtggctgagaacgttggccatgtcaagtccgtggcccaaatgaccggccgcgactacgacaatcagatcggcaccgccctcatggccgacggcctgggcaccacgctcgccggcttcggcggcggctccggcaccaccacctacggcgagaacatcggtgtgatggccgccaccaaggtgtactccaccgccgcctactggtgcgccgccgcctttgccctgatcctgagcctgtgcccgaagttcggtgccgtgatcaacacgatccccgccggcgtgctcggtggcgtgaccacgctgctgtatggcatgatcggcatgatcggtatccgcatctgggtggagaacaaggtcaacttcgacaagccgctgaatatcatggtggcagccatcaccatgatcattgccatcggccaattcgcgttcactgttggtggcatttccttcaacggcattgccattggcacgatcgtgattcttgtggcctaccacggcctgaaggccattggcaaggcaaccggcactattgccaaagacgatccggatattttgtagtgtgttttagggctactgggctgtatcttggctcagcccttttgcacaatggcccctaccttcacgggtgggggccatttgcgtgttccatggagcggtgctcgccttacgtggtggtaaaacccatggggcggcaaatatcccatggggtggtaaaaccctcatggggcggtaggtgaaaatggctttattctgcggtttcacaatttcttcaaaccgccccatgggcaagttgccgccccatgggcgagttaccgccccatggggtcataagtaaagagtgggatgacagtgtggcgagcaccaagcaaagtagggggcttacgctaagctcggaaagcttgcgtaatttgcgtaacctttgacatgaaaggccactgtgccccgtaataatttcgatgatcgtgacgattccgctgatttccagatgaacgacagcgcggaatcccgcccccttacctttggcgaacttggcgtacccggaccgctggtgcgcgtgcttgcggcagatgacaagaagaccgcattccccattcaggccgacaccctgcccgattcactggccggccgcgacattctcggccgaggtcgcaccggctccggcaaaaccctcgcattctccattccgctggtcacccgcctcggttcctacgattcgttcggcgaaatcgcgatggaggagttccgcaaggaaatcaagcgccgcaagaaggccagcctggaagagcgccgcgccgacgacttcctaccgcacccgcgcggcctggtgctggcccccacccgcgagctcgcgaaccagatcaacgacgtgctgatgccgctggcccacacgttcggcatgaacaccaccacggtgtacggcggcgtcaagtacatccaccagatccgcgatctgaaggccggcgccgatatcgtggtcgcctgcccgggccgccttgaggacctgctgcgccagcaggcgctcacgctctcgtccgtcgaagtcgtggtcatcgatgaggccgacgaaatggccgatatgggcttcctgccgccggtcaagcgactgcttgagcagatttcgcccgacgcccagcacatgctgttctccgccacgctcgatcacggcgtggatgaagtggtgaacaccttcctgcacgatcccaaggtgcacgaggtcgattcggccaccaccgaacccgacctgatgacccaccacgtgttcgaaaccacgcgcggcgacaagcacgaactcgtgcgcatgctcgcctcgggcgaaggccgccgcatcctgttcacccgcaccaagttccaggccaagaagctcgccaagaacctgacgcagaacggcattccggccgccgagctgcacggcaacctgaaccagaaccagcgcgatcgcaacctcgctgcgttcgattccggcgatgtgcgtgtcatggtggccaccgacgtggccgcccgtggcatagacgtcggcggcgtggagctcgtggtgcaggtcgagccgccggccgacccgaagtcctttgtgcaccgctccggtcgtaccgcccgcgccggcaaggcgggcgacgtggtcaccctcgtgctgcccgagcagcgccgcgagacgcgccgcttgctgaaccaggccggcatcaagaccaagatgatcgaagtgacccacgattcgcccgaagtgcttgagcttgtgggcgaccgcgccgagcgcgtagatggttggagcctcgacaagtcgcagcccgtgggcaacccgcgcaagggcaagaacaggggcgccaagaacgcggcgggcgacgagtccggccgcggcggcaagcgcaagcacaatcgcaatcgcaaccgtgacgagcagaacgttgccgagaccgagttccagcacgagaacgcaggcggcgagtttgttgccgaaggcgagccgcagcgcaagcacggcgacaaggccagcaagaaggccgtgaagaagaaccgcaaccgtgcggaacgccgtgcaggcatgagcaaccccgaggccgagcgccgcgactatctgttcgagcatggcgatgaccgccgcgaggagcgccgcaagggcgaccgtcgcgacggatacggcaagaaccggtacgacgagcgtcaggacaatggccgcgaccagcacggcaagaaccgtcgcaatgatcggtacggcaagggcgacaagttcgataagcgcgacagggccggatacggtcgcaacgatgatttcggcagccgcaggcacaatgcgggccgtgatttcgaacggtccgattcccgcgatttcgagcgtccgcgcaagcctcgccgcaatgaacgcagccacgaggattacggcttctcctatgacgagcgctcccatgacggccgcagacagtccatgcgcaacacccgtcagggcgaaggcggcaagcgcatccatcgcaagaacgagaaccgcatcgtacgcgacgagcgttcagaaggtgccaagcgtcacgaacgccgcatgatcgccaaatacggcaacacggaaggcccgaaccgccgtcattccaagaagaatcgccacaatgcgccattccgtatgaagtctggacgccgttagtccgacagcgcgtatgaatcaggcccgacgacctttgatggtcgtcgggcctgattgtgttataggccggtgtttgcgatgcggatgcctgttcgcctgcctagcggccatgacgattgcacttatcgccgcagtcgttgtgatcgtggccatgccgaaacggcggtaatggcctgtacgcaccctagaataacggatatgacgcaatcgcagccccgatccaaacgcacgcccacccttgaaatccacgggagaatccttgacgcggcaaggcggatcgtggaacgggacggtgtggacggtctgaccatccgtgcgctgtccgcacaggccgatgtgtcgcccaccagcatctaccagcacatcggcggcaagcaggcggtgtgcgatgcgctcatcgacacatacttcaccgatctgcgcgaacagctcatcgccattgacgaatccgaccccgtgctgcgcctgcgcagggcgggcataatctaccgtgaacacgcgctggacgcccccggcatttacgcgctggtctggatggggcaggcgtcggactcggcccagcactgcctggacgccatcacgcagatcattcgatacggccaggcagcatctgtattccgcggcgatgacccccatctaatcgcatcctccatctgggtgtccatacacgggttcatccaattcgaactgcgttccgcacaaccccgcacacgcggccgcgaacgggtcgaccggtcgtacggttacctgctcgacctgctgatccgaggcattcagaggtgaatgagttagctccctctgatgagggagctcagtattgatacgctgtactgccatcggcgttgcggatggtgaaagtgggggattgctcgatgttgaggtccacggtcagggaatgctgggcgtcggcgctcgtcgaacgatagacgaagtgcttgttttccagcttcacggcctcggtacgcgcatccagcagccatgggttgcgacggcgcagcgcgatcagcgcctgatgcagccggtatgtcggctctcccagcgtggacagttcggcaggggagccggggaacttcggacgtacgtcgtcatcgccgccgaaacgctcctgtttgacgcccacatagccctgttcgtcgccgtaatagatgcttggcacgccgccgaccgtcatgagcaccgccaatgccaacgccgccttggccgggccaatctgcgatgcgatacgcgtcacgtcatggttgccgatgaacgtctgcggcacgaaggaatccaggaacgcgttgtgccgcttcaagttccaatccagctcgaagaagttctccgtctccagcgcatgctggatcgacttccatagctcgtattgcgtgatcgaatccatcgtggattcctcgatgatgcgcgggtaatcgccatggatcacctcgccgaaaatccacgaatacgggtgtgcggctttgacctgcggcaacacgcgcgcccagaacgggctcggcacggcatacgcggcgtcgaggcgccagccggcggctccgcgatccagccaatggctcatcacatggaccacatagtcaacggtctcgtcagccgaatggtccagcgccaccagatccccgtgcccctcgaacacatccaaagcgggttcgccattatcaccgacatgcgcgcggaccagaccatgccacgggttgtcggccggattcaagcgtccggcggtctcgtcaagcgccgcctgaacggccggatgattgcggctcacgtgattgaacacgccatccagcatcacctgcaatcccatgtcccggcaggccgcgacaagctgatcgaacgcggcatccccgcccaatcgcacatcgatatgcatatggtcgagcgtgtcgtatccatgcgtcgccgactcgaacaccggacccagcagcaggccggacgcgcctagatcgcgcacgtactccagccagggaattatcgcgtcaaggccgcggccatggaactggcgcgggccggcgggcctgatatcggcaccgcagaagcccagcggatacacgtgccagaacaccccgtacttcacccaatcgggcattgtgcggctcgaatccgtgcttacaaccactgtgcacctcctgattgataccgtgtccattttcgcacatcgcggtgcgaatcccgggtaatcggcatgaaacgcagtccgtgaacatgtggccaagctcacatattgggacattttcctgaggcgctacatgccgtggctacgcttccaaccagtgccataagcagacgagagataccccaaaagggtcgcaatgaagagaacctttcccgcaaaggttattgaagaggaacagagggttattatgaccaccgccgcagcccaggccccggcacctggcaagttggaattcaaggacgattacacgccggacgaagccgaacgtgtgattcgcaattcgaagggactgcccgtaggcgttcgtcccaaaatggtatggacatggaagaaggccctgctgtgggccgccatcgccatcgtatgtgcctgcggatgggcgattctggccgtctcgcgcggtgagcagatctccgccatctggttcctggtcgtggcgctgagctcctacgccatcgcctaccgcttctatgcctattacatccagatcaagatcatgcgcaccgacgacgcgaacgccaccccggccgagcgcgtgcatgacggcgcgaacttcgaacgcaccgaccgccgcgtgctcttcggccagcactttgccggcatctccggcgccggaccgctcgtcggcccgatcctggccgcgcagatgggctacctgccctccactctgtggatcatcctcggcgtgattttcgccggcgccgtgcaggacatgctggtgctgtggatctccgccaagcgccgcggtcgctctctgggccagatggccactgatgaaatgggtaagttcggcggtatgatcctatccatcttcctcgtggtgatgaccgccatcgccatggcattcctggcgctcgtggccatcaaggccatggccgcctcgccgtgggccgtgttctccatcggtatgaccatcccgatcgccctgatcatgggctgctaccagcgtttcctgcgccccggccgtgtcattgagaccacgctgctcggtttcgtgctgctcgtgctcgacatcgtcgccggcggatggatcgcctctatcccggccgtggccgccgtgttcacactggacgccaagcagctcgtcatcgccctggtgatctactcgttcgccgccgccgcgctgccgcactggctgctcgtcaccccgcgcgactacctgtccacgctgatgaagatcggcacgctcgtgctgctcgtcatcggcatcatcatcgccaacccgtccgtcaaggtgccgggtctgaccgaactggcctccacctccaccggcccgaccttctccggcaacctattcccgttcctgttcatcaccatcgcctgcggcgccctctccggcttccacggcgcggtgagctccggcctgaccccgaaggccgtggagaaggagaaccagattcgcatgatcggctacggttcgatgctcgtcgaatcgttcaccgccgtcatcgcgctgatcgccgcgatcaccatctcgcagggcgtgtacttctccaccaacatgtccgccgcacagatcaccgccgcatccggcgtgagcatctccgccacctccacgccgggcgaacaggccgatgccgccgtcaaggccgtggagtcgatgaaggtctccgacatcgaaggcaaccagatgcaggtcacctgggattccgtggacgagaacggcgcggccaagacctacgaaggcgccgcggcgcttgagcaggccgccgccgacatcggcgagacctccatcgtctcccgcaccggtggcgccaccacgttcgccatgggcatggccaacttcctcaagtcctacctgggcggccacgactcgatggccttctggtaccacttcgccatcatgttcgaagccctgttcatcctgaccaccgtggacaacggcacccgcgtggcccgctaccagatcggcgaaatgctcggcaacgtgcgcaagctcaagaagttcgccgacccgacctggaagcccggcaacatcatcaccacgctgatcgccaccgcgctgtggggcggactgctgtggatgggcgtgtccgacgcgaacggcggcatcaacgcgatggtgcctatcttcggcatctccaaccagctgctcgccgccgcctgcttcgtgctgatcaccgtgtgtgtggccaagatgggctactggaagcacctgtggataccggtggtaccgctcgtgtgggacatcgccgtgaccttcaccgccgacttccagaagatcttcgggccgctgagctacttcaccaccgcctccaagtatcaggcgcagatcgactccggcgagctgaccggcgaggcgctgaccaacgccaaggccgcgctgtccaacgcgtatctggacggcgtgctctccgtgttcttcctggtcatgatgggcgtcttcgtggtagtcggcatcgtggtcgtggcgcgcacgttcgccgctggcaagtacggtgccgaaacgacgtccgaggagccgttcgtggaatcccagtggttcgcgccctccagcctggtcgccaccgcgcttgagaagaaggtgcagcgcgaatacagcgccaagctgcatgagcttgtgcggaacgggcaggttgcagcgtagtgcgtcattggctccccttttttcaaggggagccaataatcagcgaaaggagacaaaatgctcggcaaactcgttgccgtatggcacggcatcgtctggtatctgcgtgagatcagcggcgaggcccgctacgaccattatcttgagcatttcgcggccgagcatcccggcgaaacaccgatgagcgaggtcgaattcattcgcgcccgcgaggaatacgaccgtctccaccccaataccagttgttgctgctgacaggccgcaatagcataacaacaccataaaacccgcgcgccatgggaactacgtagccattcttccgttacaatcagtgtgacggcttccgcccccgaagaagaaggtgttaattccccttggacgtctcactggcgcatttcctccaacaagtgctttccaacccggctctgaccgtcacaacgttgctgacgctgggagtcatcttcgtcaacggctggaccgacgcacccaacgccatcgccacctgcgtgaccacacgatgcatgcgcgtacgctccgccgtcatcatggcggccatcttcaacttcctcggcgtcttcatcatgacgcagctcaacgcctccgtggcctccaccatcagcaacatggtcgatttcggcggcgacacgaacgcggcgctcatcgccctatgcgcggcgctgttctccatcgtcgtatacagcgtgggcgcctcgctgctcggcatacccacctccgaaagccacagcctgatcgccggcctgtccggagcggccatcgccatccaaggcggcatcggcggcatcaacatgggagaatgggtcaaggtgctctacggtctggtcgcaagcctcctgttcggcttcgccgtcggctggttggtatgcaaggccgtgaccctgatttgcgctggcatggaccgccgccgcaccaacgggttcttcacctacgcgcagatcgtgggcgcggcggccatgagcttcatgcacggcgcgcaggacggccagaagttcatcggcgtgctgttcctcggcatggcgttctgcaatggccaacccagcgtgaccggtgtgatgattccgatctggctcatgattctgtgcagcaccatcatgggcgtgggcacgtccgtcggcggtgaacgcatcatcaaatccgtgggccaggacatggtgaaactcgagaaataccaaggcttctcggccgatctgtcaagcgcgctgtgcctgctcgtcatgaccgtgctcggcatccccgtctccaccacgcacaccaagaccagcgccatcatgggcgtgggcgcggtacgccgcctctccgccatcaacttcggcgtggtgcgcgacatgatgctcacctgggtgttcaccttccctggttgcggtctcatcagcttcgtaatggccaaactgttcatggtcgtgttctagaaaggaatccacccatcatggcgagacaaaaagacacgttctacttcgacggattccgccgcagcgcggactacgcatgccaggccgcgaagctgctgtccgaggtcatgcacgacttcaatccgggccagctgcgcgaacgcatggacagcatgcacgcgattgagaagtcagcggacgaggtgcgccacgacatgatggacgaactggtgaccgcgttcatcacgccgttcgaccgcgaggacatcgacgagctcggccacgtgctcgacgacgtgaccgacagcatcgaaggcgtgctcaaccgcatgtactacgacaacgtgaccgacatgcgcgacgacgcggtccagatgtcggatatggtggtgcgcgccacggaaagcatctgcgagctggtcaacgaactgccgcgattccggcattccaagacgttgcgcgaactggtgttcgccatcaacacgatcgaaacggacgccgaccacctgttcatcgagtcgatgcgcacgctgcacaccacctgcaccgatccgctgcaggtgttcgcctggcatgacgtctaccgtcacctcgaacagtgctccgacgactgcgagcgcgtggccaacaccatcgacagtatcgtcatgaaaaacagctgaggttggtttttcacaacctccctctgatgagccgagccgtgaagaaaacgccggaggcgtttttaggcgagggtgagtgacaacgagcgaataagaggtcagctgcaagctgtcctgaatcgcgttcgaggtggcatcgcgaagcgatgtcggagggagaggcctacttgaccaaaagccccctcacctatgggcgttgagccagaggatggcgagttgggtgcgattggtcaggccgagcttgtccagtatcgcgctgatgcgattgcggaccgtgccttcgctcaggaacagtctggcggcgatgtcgcggttatcgaggccctcggcgaccagcgcggtgatctcacgttcgcgctcgccaagcaggccctcgatggactcggcggtatctctggaatcgtcggaatcggcaggatccggagttcgttcggtgagcttgccgagcacttccgcgccgagcaccacctgaccggccatcaccgcctgcagcgcgggcccgaccgccgccacatcctgtttgatgagatagcccttggcgccaagtcccatcgcctgcgcgatatacgactggtccgcaaacgtggtcaggaacagtatgcgcgcggccgggtccgtggccagaatctcgcgcgcggcatccaaaccgctggtgccgggcatctgaatatcgatcagcagcacgtccggtcggctcgccggtgtctcgaaataacggcgcacggcggcgtctccgtcatttgccatccatagcacctcggccgtgccggtggccgtcagaatcgtctccaacgactggcagacgatcggatcatcatccacgattgcgattctcatcaatccctcgattccatggtccaacgcttcttcggcacggatacgaacacacgccagccgtcctcatacggcccgcagaccgcggtgccgccaagggcgcgcacgcgcgattcgatatccgccaaacccatgccgcgcatcagctcatcggccgaaccacgcatatcggcaacgccgtcggcggcgagtcgcgagccgacgtgcgtggcgcgcatcgcacgcgggcgggcagcggccgtccgggacccatcggactcggacacggccggccccggatcctgaatgaccaactgccagaacgcggggaagtcacgcaacgtcacgctcgcctcgcgcgccgcgctgtgatgcaccacgttcgacaatgcctcgcgaatcacggtcgcgaaacagcgcgagaccggcgcaggcgccttggcgatatcgttggccagcgtcacggcgaaaccgggggagatgccgtcgaacgacgtgacggcatcatcgatctgcgcggcgaaatcagtgccatcatcctcaagatcatgcaccgaacggcgcaccatcgtcatcgcatcatccaacgtcgcacccaacgtggcgaacccttgcgcagcgaccgtatcgttcgtcgccttggccaccgttttgccggcctgcgcctgcatgatcgcgcgggtcagcagatggcccacattgtcgtggatctcccgggcgatacgcgtgcgctcgccgagggtcgccatgcgaatcgactgggcgcgttcctcatcgatgtcggcgatgcgcgaacgagtggcccgcgaggattcgcgcgccctgtcctgcgcgtgcagcaacgcgcgccgcgcctcgtccgaggaggcgcgggcccggcccagaacgaatccaagcagggcgaccagcgtcatcaccagcgtctggagacggtcggtgccacgggcgaaccagagcgcgatcagcggcaacacccatatccagcgcgcggcggccgaaagccacggggccgaacgcattgcatcggcaagggaacggcgagaggccgcggtccgcgagacactgggggagcggccacttgccgcagtccgtgccccagcccgggctccggtcgaggcgagggccggcagccgtgcagtatcgtaggcgatgagcggcatgaacgcgcaccatgaaggcaccgccacggcgatgacgagatacgccgtacacaagacccaagaccattgcgcgggacgcagccattccaccaatccggcgacggaaacggccaacagcaggccggcgatgaacacgccatcggaccgtagcccgacaaccaggcccaacacgagtagcaagcccatctcggccaacacgcgcatggcacctccccggctcgacgctcttccaccaccagtctagcggtgtgcggaacacgacgaacttgacgggcgtgcggaattacccgcatgacggtccaagacaacgggcctacacttcccgaatagatgaggcacaagcgtcggatgtcgtcgacacaaccgtaaagggatgataccgatgattacgcaaagccacagggcgtccaactattcgatggacgagatcagcctgatgccggtcgataaggtgtacaaggccatgcagaccgacgccgaaggactgtaatgacaaatgtcacgcctgtacggccaagtcgtgacgtttgcctgtggcggcgtccggccccttcttgggatgatggaatcgccaaggaagggagtgactatgacaaccgacaacagagcttccgaacacgactcgacaaccaacccggctctggccgtgcacgtcagccaactggtcaaacgctacggcgacatggtggcgctcgactattttgaccttgacgtgaaccagggcgagattttcgggctgcttggaccgaacgggtccggcaaaaccaccgcgatcaactgcatcctcgcgctgctcacctacgattcgggcacgattcgcgtgttcggccagccgatgacgccgacctcctacgcgctgaaacgtcgtatcggcatcgtgccgcagaacgtggccgtgttcaacgaactgaccgtcaccgaaaacatcgactacttctgctcgctgtacgtgccgaagaaaaccgaccgcgcgccgctggtcgaggagtccatcgaattcgtcggactccaggacttccgcaagttccggcccggcaaactgtccggcggtctgctgcgacgcctgaacatcgcctgcggcatcgcgcacaagcctaacctgatcttcttcgacgaacccacggtcgccgtcgacccgcaaagccgcaattcgattctggaaggcatccagcggctcaaccaggccggcgccacggtgatctacaccagccactacatggaggaggtcgaacagatctgcgaccgcatcctcatcatggaccacggccggcacctggcgctcggaaccgccgacgagctcaagaacatgatcgacacgggcgagcgcatcaccatcgaaacgctcgatctggcggattcggcgatggccgaggtccgtgcgctgccgtgcgtgatcgaagccacctacgacggcaaggaactcgacgtgcgatgccgtcgcggcgaacacaacctgaccgacgtgctcgacgcggtgaaacgctccggcgccaacatcggccacctgaccagtcgcccgcccaccctcaacgacgtgttcctcgaactcaccggcaaggcgctaagggactaacaatcttgcccccgctagcggggctcccgcgaagcgagtgggggtggccttgcaacaaccaccctcagtcggcttcgccgacagctcccgtcagcgggagcaggtaaggagacatcatgtggaccacatttctggtcgcattgaaagcgaacttgcgcaaccggtcggcgttgttctggatgaccgtgttcccgatcgtgctggcgaccatgttcaacggactgttcggcgggctggccgaagcatacgaactcaagccggtgccgatggccgtcatcgaagacacccgttggcagcaggcggacggtgcccgcaccttcgtagacgcgctggccggggaaacggaatcggcctcagacgacacgacctacgccgaaatcgaccaaaagctgctgaccatcaccacagtcgacaccgtgaaggaggccgaacaacggctcgccgacggcactgccaacggctatctgaccgccgacaataacggccgattggcgatgaccgtgagccgggaaaccgccgtcacagccaaggactccacgcaaaacagcggactggacattagcctcgcggccctgcgcagcgtcatcgacctgtacaaccgcaccgacgccgttacccggcagaccatcgccgacaatccacaggccgcgctcagccggaacttctggaacagcgtcgggcagaacgtcgacatgacccatgagacgacgctcacgcatttccagcctgacgagatcgcccgatactattacgcgctgctggccatgtcctgcatgatggccatgggatactccatcagcacagtcgccgccgcacaggcgaacctgtccgcgctgggcatacggcggaccgtagcgccgctgagccgggccaaacagctcgtcgcgggcttcctctcctgctggctgtgctcgtcggtcgccctgtccatcgcattggcctatatccggctcgcctgcaacgtctcgctcggcggacgcgaaccggcggcgatcctcgcggtcatcatcgcctcgttcatgaccagctcagcaggcaccctgctcggtgcggtgccgaagctctcgtacaacacgaaatacgggctgtcgaccggcatctcctgcacgctgtcgctgttcaccggactgtacggcgggtttgccatgcagatcagcgactggatagcccgcaacgcgcccatactcggcaccatcaaccccgcacagcaggtgacgaacctgttctacgacatcctgtactacgacagctaccggccgttcatcaccacctgcatcattctgctggcgatgagcgcggtattcctcttggccggcatcgcaatgctgaggaggcaacgttatgaacacctgtaaagccacgctgcgcgtgctgttcgcgcaccgggtctacctgatgatctacctcgtattcataggcatcctgatgatgtccatcagctgggcgatgctgacctccgcatccggctccatgtccgcggtgttcgaatcgaccaagacgcgcgtcgccatcatcgaccgcgactccgaccggggtgatatcgccacgtcgatgcgcgcctacctgcgcgattccagcgaactggtggacctcgacgacaccagcgaaacgctgcaacaggccgtcgcctcgaactgggtggacctgatcgtcatcattcccgacggattcgctgacgattatgtcgccgcggcggcggacggcgacaatccgccgaacgtggacacggttaccagctacgcatccggctccgggtcgatggcgcggatgaacgtcggcgggttcctctcgctcacccgcaccgcactgatcggcgcgcagacgagggtcgaccaggcggcgctcgccggcatgatgaacgctacaggaggggccgccggttttgatggcgcgagtctggaccaagacatgctggactcgctgccggaagggcaagtcgacaagccggatatcaaggatctgtcccaggccgccaaaatggccgccgaatcggccagcgatacagacgtgaaccatcagatcgccgtggtcgatacgccgaccgaggagtcggcaagcgctgcggatacggcggtcagcggattcggcggcaccatgaaaaccgcgctgtacccgctgtccctggcgatgaccatctgcggatcgatgatcctgggcgcgttcaccaccggcgaggtgcggcggcgtctcaccgcctcgccccgacgcatggtcctgatgggactccagcggttgctgacgttgggcggattcgcgctcgtcgtatgcgtcggctatttggtgctgtcaatcggtctgatgatggcggcggggctcgatccgttgcacctgagcgtcgggggagtgctgatgacgttcggcgcgacctgcgtgtacgcgctgatgaccgtcgcctgcggattcatgctcagcgagttcgggctctcggaagaggcggccaacgggttcgccaacatcttcggcctgctcatcatgttcacgtcgggcgtcgcattgccggttgacatgatgcccggcgtgatggtgaccatagccaagttcctgcccggctggtggtattgcaccgcgatcgacaacgcgctcggctccggcacggcggaggaaaccggcataagcgtcgccggctgggccggctcgctgggattggtcgcactgttcggcgtgatgttcatctgcatcggcctggccgccggccggttccgccgctcccgccccgccctggccgcgcccgccaccacgcagctggccgagtgagaaatcagcctttcaaccgataccgctgtgccgggtcgtcggcgaacttgactcgggcgacccgcccttccttcatcagctcgcgcataccggatgtggcggccagcggagtcaactgcagttcgcgcatgatctccttgacgctcatcgccgaatgccgttccagtacggtcataatcgccttgaccacgtcacccggtgaactgttctccatcgtgcgttgcttggtgatggtcatcgtgaacgtgttgatgtcgttgcgcgtggtcgccggctcgatgccggcctcgcgcaacgcggcggcgatgcgctggtagccgtcgccgccttctgggttcacaaacccgccgcccggatacggcgtggactccagcagcgtgaacaggaactggtttcgggtggagacgaacggcgcgcccgtcaccggatgcgggctcgccagcacgtcatgtgtcaccatgccgtacaggccacccggattggtgatctcgatgcgatcggtgaacacgctgatatgcacctgcgtgccgcgcgcatcgggcgaataatcacggtgggtgagcgcgttcgcaatcgcctcgcgcaacacgagcggcggatagtcgggcttcttcgcgccaatccaacgcatcaacgagtcgaccgcatcgtcgatcatcaccggaatcgaaccgaccaccgacttcgaggcgaccaatcgttcgtcaccccggaacacatcgtcccggctcgtccccggaaacacggcaatcgaaatgccgagccgcggatagaacttctgcggatagcggcccaacgccagcagtccggccaaggtggggcgcaggattccgccgacctccgactcgtcggaatcatcatggcgcaacacctgcagatccagcagcacatcgatgccgtctcggtcggcgaacacgcgcggatgctgttcgcgcacgcgtgccaacagtccggcaacaagctgcgggtcgaggtcatcggtcgtggcgtcgggcacgatatccagatcgtatgtgggctgcagatgctcctcgatgagccggtcgacctcataggaggtcatgcgccggtcgccgtcgccggtacggatgaacgagccgccgtgcggtccgagcgcggtggtgaagcagggcttgtcgcgcggcagcatctcgtcgatgcgcgcgaacaccagattcgcgccttcgaacgggcaggtgacgattacgggccgcaccaccggcgtcatcttctcgcacgcctggctcagcgcctcctgcatggcgcgcgcgtcgaatccctcgaccggcgtgaacccgttcttttcggacaggcccaggataatccagccgccggagccattggagaacgcggacagcgtatcggtgatggtcgaggagatcttgcgcttgcattccttgacctcgcactgttgcgtatcgttgccgatcagacgcatgagttcgatcagctcagtcattttggcagtatagtcatcgaccatggcggcctccttgaaaccattgtgccccataatccgccgcccgctcgcctccagccccgccagttcaccccaattcatgcagaattcatgggccaaaccagacgaaacgaacgtcgatgtagggttcggttccgcgtgttcgccgatgatatcggccggtcgaggcgggcgggctatgttgggtggcgtgggaatcttgcgcgtgattgatgctacggctgtgtgcttcgctctgggtatatccggcccgatcagcgggactcagccaatgtgatgccgcccgcagccatctgcttgcgggccgcaacaccaagttcctcgctgaccggcacggtcagatcctcgaacacggtgacctcgaagccgagcttcttggcatcgagcgcggtgtccttgacacaatgcgattcggcgatgcccaccacatccacgcgactcacgccggcggccttcagcgcgttggccagcgtcttgccggcggattgctcggcctcgacctcctcgcgggtctggatacggtcggtattgtcctcgataccctcaaaaccggaatatgccgccgaatactggcccttcttgaaatgatgctcgatattcagcgccttgatcgccggatgcaattcggcgttcagcgtgccggccgcaccatgcttcggccacgtgtccacgaaatccggctccgccgaccagtgcgcgcccggctcgatatgccagtcctgcgtggttgcgatatacgcgtactcgctgcgatgcgcgttcacataatcggcaatccgctcggcgaccgcgttgccgcctgcgacacccagttcgccgctttcacagaacgtcggctgcacatccaccacaatcagtgccttggtcatcgtcattccccttattgccttggattcgttttgaatattgtctcgaactcgacgtgcgattgctctcatcatagccatgcgcggccctgtgggaaacgttcgggcttacactgcaagcagcaatcgaatacaagaaccaggggagggcgaccaagaccatgctggaccatctgacgttgcacgtgaaagacatcgaccgtagcatcacattctacaaacaggcgctcgcaccgctcggctatatcgtcaaggcgcatcatgagcctacgctcggattcggcgtggatgacggaaccctgcactccgatttctacgtgtcaccgattgaagggctggaggcggaggcttcgccggtcacgccggtcacacacatcgcgttcttggctgacagtcagcaagccgtgcaggcgttccatgcagccgcgctcgccgccggcggccgagacaacggcgctcccggtccgcgcccgtaccatcccggctattactccgcattcgtgctggacccggatggcaataacatcgaagccgtcgtggattgggctcattcgaacgagtaaaaacatatccgtatcgtgcctcaggcggcatcgacggcgtaggctccaaccagtcggatttgtggtcgcaacggcggtataggtcacatcacgcaagcgtgaaggtgatggtctgctcggcggtttcggtgccgatccatgtgccggctttgcggttccaatccatgccgtccgcgtgcagtgcgtcaatgccgtattgacgtgcatgcgtgaccagccagcctgccgtctgccagcaaagtcgagtgcggttgtcggcggacaggccgtccggcagcgtgatcgtcaacgttgtgctggccgtattggtcgcagcgccgttgttcgtgccggttttgccatttgggggcacaaccgagacattgacattcggcagtgtacctcctatggcggcaaccaacccgtccgcgtccgaggaggttgctggctccaacgcgcacgtgacgcccgccgaccgttcaccggtcagccccgaggcccaagcgcgtgccatcgcatcccatgcggcatatagttccgggtagcctgagcgctgcacctcctgcgcggcgtcctccaccggaatcgtctcccaatccggcacctgcagcagatgatcgtagaagatgtttgtcgcataggtcatgtcggacacctgctccgccgtgccccagccttggctgggccgctgttggaacaggccgagcgaatccaagtcgccgtagtccagattcgtcagcctcgactcctgcatggccgtggcgatggccaccgtcgccgcgtgatccggcagtccgcgcgtgacggcgatgttcgcaatcagcgccgcgttctgcgcctgatcaggcgtcaaggtgcggcgggctccgtcggacgacaccgccgcgcaatatgcttcctcggccgtgcgcgcggtctcgcgaggcgtgaatagccgtggcagcagcgtccatgccgcgatcagcgccgcaacaacaagtatgacggctgcaatcagcgcgcccgcgccatgggagcggcgtctgccgtaccgcacctgttgtcccattgcgcctccaatatttcggtgtcatggctgaccgtgaccggctggcctatgcagcatgcgggatttgccgtgttccggctcggccgtcatcatgacagcgtggcatatccacctgaacggcggctgcgtcatcacgcgactttgtgacaagtcttcacgcttcatgacatccgcgcaaatcagcccctcgaaaccgagaatggcggtcgggattgctctgacaccaggggagctgctgccgctattgtgtgaaaggcgatttgtaccgggttgaaggagaggaacacatggcacaattgcagccgtactgcgcgattgagggcaatgatgatggattgcccgtcgtgttcgtgcatggcatgggtgtggaccatcgttcgctgatgatgctcgacaaggcgtttgacggcaatgattcaattcgccgtatatatctggatctgcccggtttcggccgtacgccggcattgcccgagcatgcctgcgggctgccggaaatggcggattggctgcaaacggccattgacggccttgtcggtaaagcggctccattcgccatggtcggcaactcgatgggcggtgcgcttgtccgcgaagtattggcgcgcgaacctcgccgagtggccggtatggcattgatcgcgccggtcgtggacccgcagcatgccggccggcatgtggccgaacatgtggttgcacagcccaatcccaagctgacgcactccttgccacaggaacaggtgttcgatttcattaccatgggcgtcaaccagtcattcgacgcgtggcggcgctaccaacggtttatcctgcccggcgtggcgttgtgcgaccgtgcggcatgcgaacgactggatcagcgttattggctggccgataatcccgaggaaatgctcggcacatatgcgggtccggtgctcatcgtcaccggcaagcaagaccagatcgtcggatacgaagaccagcaagccctgttgccgcactatcccaacgccaccttcgtgactctggataatgccggtcacaacgcgcacatcgaccaacccgaagccgtcatcgcgctcgtgcgcgaatgggtggctcatatggcgttcgttccgttgagctgacggtctgctgacagtctgccgaagcctatatgcatatgagcgaccaatgccggttgacgcaatacgccttgcaaggtatatcgtttttcgatatagtcatatcgatgttcgcggtgtcgccaaaaaaacgtcggcacctgaaaggaccgggctatgaaaaactacatgaaccgatgggtgttgctcgcgttgaaagccatcgtgattctggtctggctggcctgcctatggggccaactattcgccgtaccgggattgagcggcgcgctggccggcctctgcccgagccagacgtcgatgcactggtcatatctcattatgggcgtgctgttcctgctctgcatcgaagcggcgttcgtggccgtatggaaactgttctccttgtccggatcgggcgcgaacttgagcaggtgatttgagatgacgattcgcatcaatctcgacgtcatgatggccaaacgcaagattggcgtcggcgagctcgccgaacaaattggcatcacgcccgccaacgtgtccattctgaagaacggacgtgccaaagccgtccgcttcaccacattggacgccatctgcaaggcactcgactgccaacccggagacatcctcgaatgggaagatgtcgattgatcgacacgccaccggctcgaactcatggttcaactcgtagtctctcccaaaatcaatgatgccctatcatcctgcaagacgatagggcatcagcatatgattatgcgcagctgatatgtcgcgttgttatcactcggcgtccgcggccggtgcctccttgggcgcggagaggaagtgctcctcgctgggcagcacggcgttcaggattacggccaccacgaacgacacggcgatgcagttcgaggcgaagatttgttggaacagtgccgggaactgcgtgaagatgtcgctcacctgggtgaagccgatgccgatggtcagcgaaagcgccgcaatcgtgatgttgcgctgcgtgaagcccgcctcggcaatcatctggaagcccgaaagaatgatgttgccgaacatcatgatcgtgcagccgccgagcaccgcctgcggcagcgagttgaacacctcggcgatggccggcacgaagctcgccagcaccagaatcagtccgccggagagaatcaccttgcggttgacgaccttggtcatggccaccaatccgatgttctgtgcgaacgaggtcagcggcagacagccgaacaggccggatacggtggagatcaggccgtcgccggcgatggcgcccgcggtctcgcgttcggtgggcgtacggttcaggcccaccttggtcagcgcggcggtgtcacccagcacctcgaccgaggagacgacgtagagcaggccgatggagatgatcgagccccagtcgaactcaggcttgaacggcatgaactgcggcacggacacgatggcgaggttctggaaaccggagaaatcgaccttgcccatgcagatagccgccacatagccgaccaccagaccgaacagcacggacagctgcttggccgtgcccttcatcaacagctggaacgccaggcaggcaaccaaagatataagcccgagcgtcaggttctgccaggaaccgaagtccttggctccgctgccgccgccgaagctcgtggcacccacgttgagcagcgagaagccgatcgacgtgaccacgatggcggagacgatgggcggcacgaaccgacgccaatacttggccgtcaaacccagcacaagttccagcagaccgccgaccattaccgcgccgaccaccgcgccatagcccttgtccgcgcagatcgccacggcggccgccacgtaggtgaaggagatgccggtgaccatcggaagtcgcgagccgatgagccacgcgccgtacagttgcaggcaagtgcccaggcccgcaaccagcaggccggactggatgatggtggccgattgggccggggtcatcttcgcggccgaggcgacgatgaagatcggggcgaggttcgccacgaacatggccatcacatgctgcaggccgaacggaatgcccttccagaaggatactggcgcgtccagcgaagacaacgcctcaaaggatacggaatgattggttttcttctctgacatgattctcttcttctctctgttgctcccgccggcgggagcagccaatgtgctcagtgcctaaatgtgatttcgccggtctcgggattcatggactcgacgatggccagcgaatccacatcgtagccttcagcgcgcagcgcgtcaccgccgccctggaagcccttctccacggcgatgccaatgccctcgaccgtggcaccggctgcttcgcacagatcgatcagaccgcgcaacgccttgccgttggccagaaaatcgtcaataagcagcacatggtcgccggcgttcagatacttcttggccacgatcaccgggaactccttctgcttggtgaaggaatagaccgtggtggtgtactggtcgccgtcaaggttgatggactgcgccttcttggcgaacaccaccggcacattgccgaaatgctgggccgccacacacgcaatgccgatgccggacgcctcgatggtcagaatcttggtgatgtgcttgccggcgaaatgagcggcccatgccgaacccatgcggtcgaacaggcgtacgtcgcactggtggttcagaaacgcgtccaccttgagcacattacccgccttcaccgttccctcgctttggattcgctcctcaagttcctgcattgaacctcccattgttgtatgtcagtgaatgatatggatactcgtaagtgtacgttgtcctgcgctgacccgtgcatgtggtaaacatgaatgtcgcgattcaaagggaggcaacagtgtacgacgagccggaagtcatcgcacgcagcgcacaggaactcgtgggcgacctgaacccgcagcaggcggaagccgtgcaataccgcggtcaggcgctgctgatcggagccggtgcaggctccggcaaaacccgcgtgctgacccgccgcatcgcctggatcttgagccagttcggcgcatggccgagccagattctagccatcaccttcaccaacaaggccgccgccgaaatgcgcgaaagactcggctcgctgatcggcccggtggcccagcgcatgtgggtctccaccttccactccgcctgcgtgcgcattctgaggcgcgacggcaagtccatcggactcaagtccggcttctccatctacgattccgccgactccgagcgactcgtcaaaatcatcgccaccgaattcaacctcgacatcaagcgctacactccacgctcgattctcggccatatctccgacctcaagaacaatctgaccggttggaaggaaaacctcgccgttcacgcgcccgacttcacgcccggccagcgcggctaccagttcggcacggtgggcgaccttgaagccatctacgcggtgatctacgccgaatacgagcatcgcttggccctggccaacgccgtcgacttcgacgatctgatcggccgcacggtcgagttgctgcgcactgacccggccgtcgccgagtactaccatcaccgcttccgttacattctggtcgacgagtatcaggacaccaaccacgcccagtacgtgctcgtgcgcgagctggccggcgtggacacgggggagaaggccatcccgggcgcgcctaacgccggcaagtccggccccgcctggatcaccgtggtgggcgattccgaccagtccatctacgcgttccgtggtgccgacatccgcaacattcaggacttcgagcaggacttcccgaacgccaagaccatcatgctcgaacagaactatcgttcgacgcagaccattctggatgcggccaacgcggtgatcagcaacaacgagggccgcaagcccaagaaactgtggaccgcgctcggcaagggcgagccgatcgtcggctacgcggcggacaacgcccagcaggaggcccagtgggtggccaccgaaatcgcgcgcctgcacgccgaagcgggcatcgcctactccgacatggcgatcatgtaccgcgccaacgcccaatcccgctcgctcgaagaggcgctgatcaacacgaatcagccgtatcagctcgtcggcggcaccaagttctacgaacgtcgcgaaatcaaggatgcgctggcctatttgcaggcgctcgtcaatccggacgacgatgtgaatctacgccgtattctcaacgtgcccaagcgtgggcttggcgaccgcgccgaaggcgtgctgctcgcctacgcgcgcgagcatggcaccagcttcttctacgcactcatgcacttggatgagatcgaggtgccgacacgcaccgccacctcgctacgagcattccgcgatctgatgggcgcgctctcgcagttcacgcgcgcgcacgactccaagcccagcgagatcgtggccgaagtattggagaagtcgggcttaagggccgaactcgagaaatccgtggacccgcaggacgcctcccgtctggagaacctctcccagctgcagtccactgccgccgaattcgaacagaacacgcctgacgccacgttgtccgcattcctggagaccaccgcgcttgtggccgactccgaccaactacccggcgaggcggaggactccggcaaggtgacgcttatgaccttgcacaccgccaagggcctcgaatacccggtggtgttcctgaccggcatggaacagggcaccttcccgcattcgcgttcgatggaagacaccactgaactgcaggaggaacgccgactcgcctatgtgggcatcacgcgcgccaagcagcgactgtatgtcacgcgcgccgccgtccgctcccagtggggccaggccgccgatatgatgcccagccagttcctcgacgagattccggattcgctgattgattggaaacgccgtgaagccggcgtggagcgtatgcgcgccagctgggagaccgatggattcgccgacgatttgggcggctgggatgatgacgatttcggcggcgccgcgtttggcgggtcgtcgacgttcggctcgcgtggttcgtccggttcgggttcgtcctatgggtcgcggtcgcggtatgggtcgtcgtatggctcgggttccggctcttcgtcgtatggttcccgttcatcgtcgtatggttcccgctccggctcgtcctcctatggttcccgctcccgttcccgttccggttcttcgtccggttcatatggtggcacccgtggcggcaaggtcaccacgcgccgtaccgcaccgaaatccgattcgaccggctctgccgtgcctagctcgaagctcaccaaggacaatggcctgaatatcgccgacttcgccgtgggcgacatgatcagccacgaccagtacggtctcggcaaggtcaccgacgcacaagacaagggccgcaattcggtaatcaccgtggacttcggctccgccggcgtcaaacgcctcatgctccgcgtagcgccgattgagaagttgtagataaattggcccctctgacgaggggctgagttatataccaaataaattcgcaaaaaacaagacttgtgttcttcatcacagtgtgggcataatgcggaggttgtgcctacgagccctgggaacaggggagaggaaaaagtagttatgaagaacaagctgtttgcatccgtgcccaatattctgttcggcgcgctgatcaccatcgcgccccagacctttgcgcacgcctgcaccggccatgacatgccgggggcctgccactactcgcagcaggcggccaccggcatcggcgtcgtcatcctcgtgttcggcgtcgtggctttgttcgtcgccccgcagattcgcatcggcctcaatatcgccgccgcagccgacgccctgctactactcgccgtacccacctttctgatcggcatctgcaagggcgcgatgatgcactgtcgcatggttatgctgcccacgctcatcgtgctcggcgtgctcaccatcgtgttcgcggccatcgccatctggctcgactctcgcgccgccaagcgcaactgatcgagcagacggccggagcccagccattccgaacgctggactccggcctcgcttattgcaaccgcactataagcaacataaggattcatcgtgccatcccatatcgcattgcgcggccttccgattgaaaacctcaaacgcaagccgttccgcaccggcgcactgctcgccgtcgtcaccatcctcgcgctgacattcttcggcggcaccatgctgaccatgaacctcaacactggcatgaccagtatggaaaagcgcctgggcgccgacctcatggtcgtgccgcaaaacaccgtgcagaaggccgaagcgctgctcaccaacggcaatcccagcactttctatttcaccaaagacatcgccgacgaggtcatgcaggccgacggcatcgcacaggccaccgaacagacctatatatcatcgctggccgccgcctgctgtgccgaaaagctgcagatcatcggttacgacccggacactgacttcgtcatcgaaccatgggtcgcctcccagttcgaaggcccccttgaagacggtcagatgattgcaggcgcaaacgtcaacgtgtccaccgacggcaccatcgaactctacggccgttcatggccggtcgtcgcccagctcgccaacaccggcaccagcctcgacaactcggtgttcatcaaccaaaacaccgtgcccgacatggtcgccgcctcggccaaggtctccaagcaggtcatgtccgccgaatatgccggcaaagccgtctccaccgtgatgattaagacgcagcaggggtacgaagcgcagaccgtagctgagaacatcaagcgtcttgattcccgattcgccgatttggggtacgtataccccggcggcatcaccgccaacaccagaacttcgctgaccgcgcttgtcacctacctcaagattttcgtggcggtgatctgggtaatgggcgtgattgtgctgctcgccgtattcgcctcgtcggtgaacgaacgcaaacgcgaattcgcgtccctgcgcatcatgggcgccacgcgcggcatgttgaatgccatcattctgaaggaatccgccatcatcggtctgatcggtggcgtaatcggcgtcggcgcggccagcctggtgattttcccattcagttcgctgatcggcaaacagcttcaattgccgtatctgcaagccagcccggttgcggtgatcggattcattgccgtgaccattgtgtgctctacggtcatcggcatcatcggttcgctggccaccatgtggcgtctcggccggcccgaagcctacctgaccctgcgagagggggagtgatatgactgagacaactacgccgcttcagccgaccacggttgagccgaccaagctccagccgaccacgccagctcagccgaacgcgccgactgcgccggattcgccgcacgtaaccgagacgccctccccggaccatctgctgaccttgacggacctgacccgccagttcgtccgccgcggcacgccgttcgacgccgtcagccacgtgaacctcaccgtcgatgccggcgaattcatcgccatcgtcggccggtcgggcaacggtaaaagtacgttgatcaacatggtcgctgggctgattcgcccgacctcgggaaccgtgagcgtggctggacgcaatgtggccgacttgggcgataaagcactgtccgtgctgaggaatcgcaccatcggattcgtgactcaaagccagaccctgctcggcaacctgaccgtgctcgacaacgtgattctgcccgcaacgatgtttccggagccgctgccgttcgcccaaaacgcagaagcaacggatgccgtggcgcaagccgctgccaccaatgatgaagcggccgccgattcagccgccgacccgttcatgccggatgtcattgcgccaatcacagaccaggaaaacacgccgtcaaacacggctgcgagccgttcggacctgttcgccacccgagctcgcacgctgttcacccagcttggtgttgccgatctggcagacagctacccgcgcgagctgtccggcggtgaaatgcggcgcgtctccatcgcccgcgcgctgatgaaccagccgagcttgctcatcgccgacgagccgaccggcgacctcgaccaagagagcaccgacatcgtaatgcgtctgctcagagaccaagccaacaacggcacggcgattctcatggtcacccatgatcccgatgcactcgaatacgcagatcgggtgtatcgcatggacgccggagtgctgtccatagcctcggtgtaatatggtctgctggtgtctgccaacaggtagataccgtctggagtcatagcccatcagcgggtcggcggtaggtaatcgcaagaaaaccaacccgttcgtgtttattcacgacgaagcgctggggaggcccgactcagcgcttgttaggcatatgcaaggcaagcgttccgttcagataacgacagaaggattaatccaatgacgaacgttcagcgttctcgccgtcaggtgcgtctgtctcgcgccctcggcatcgcactgacccccaaggctcagcgcatcttcgaaaagcgtccgtacgctcctggcgagcacggccgtgaccgccgccgcaccgagtccgattacgcggtgcgtatgcgcgaaaagcagcgtctgcgcgctcagtacggcatctccgagaagcagcttcgcgccgcttacgagaaggccacccgtactgccggccagaccggtaacgccatgctgaccgacctcgagacccgtctcgacaacctggtgctgcgtgccggcttcgcccgcaccaccgcccaggcccgtcagttcgtggtgcaccgtcacatcctcgttgacggcaacatcgtggaccgcccgtcctaccgcgtcaagcccggccagaccattcaggtgaaggccaagagccagaccatggttccgttccagatcgccgccgaaggcgtgcaccgtgacgtgctgcctgcggtccccggctacctcgacgtgaacctgccgtccctgaaggccactgtgacccgtaagccggaggtcgaagagatcccggtgcaggtcaacatccagtacgtggtcgaattctacgcccgctgatccgggccctctggtcaacaaatccaggacataccgctcgaaccccgcgcttctttcgagaagccgcggggttcctgcgttgtagggcgattactggccgcacaccgcctggcgaatcatcgtcgcgtacgcataggcaccggtcatattcggatgaatgccgtcatcgttgaggtattcgctatgaccttcgctatacccatgccaatcgatgatgcccacgttcttgttcttcttggcggcctcacgcagcatcgtattgttgttgttctcctgccacgggtatggcatacggatggtgatgaagtatgtcggcttgccgccggtcaggtcaatgagctgttgcacttcctgctcattcgaaatcacgccgttcgtgccgaggccaaacaccaccacactgccactgtggccggcagcggtgtcctgctgatacacatccaccgcctgcggcagctgacggttcggcaggccatcgataaaagcgttcgggaatgcggcctggatggcgtccgaagtacccgacgtcactgaatcgccgaccatcatcatatccgcgttgcagctttccgttgccggatcataggcgtacttcgaaatgtcaagattgtttggcaccttttccgcaatcggtttgatgatgggcggctgagaatccgaaccgttcttattcgcgtcagcggtattggtttcgccgttcgcggcatttatggcagaagactcgggctcgggcttcgccggtttcttgaccggcttggcgggtgccgcgagttcggggcgcagctgaatggctcgcgcttgagcgatgccattccagtccaccggtgcccacgtcagcgccacaacggtcaccaatccgataaccgacatgacccacgcgcccgggcgcagccggtagccggctttcggcagcggcttggcgtgttggctacgaggcatctgcaccgatttacgggccgcctcgaccagctggtagaaggcttccgacgccgccaacaccacgacggcctcaagaacccaaccccaccacggcaacgcctgcgttcgtgtcgccgggttcatgaactgcagcagcggataatgcatgacgtacagcgagaacgatcgcgacccgatatagcgtaggggagcacaacccagcacgtgcgaccagattgagtcattgttcacggcacaggccaaggcgcacaacgatatgaacgcggtaatcaggtacccgccttggtacatgtacgacagatacccgttggcgaaccagaatccggtcagcagtgccgccaaagccgcggtgccaagaacattgcagacgatagtgagacgggcgcccgtcttgtcgccggcctgacgttcgatctgcactgtttgcgaagccgctccagcttccgcagcttccgtacctcgcgaggaaggcgcaatccagatagccaacagcgcgccggcggccagctcggcgaggcgagtatcggtaccgtaatacacgcgggaggtattggccgggtcaaacagcagcaccatgtcggcggtggaagcagccatgatgacaagaatcgccatggagcgcacccatttggacttggtgattttgccgagcaccaccatcagcaacggccaaaccagatagaactgcatcgtcacgcccaagaaccacagatgggtcagaggagaaggcaatccggccgcctcgaaatacggcaccttgcggaagatgtacacccaattgctggcgaacaaggcgctcggcagcgaatcggaaaccactttctgcaacaggctgggagcgaacatccaagtgagccaaggcaccacggcaatggtcgccagcatcaccggccataaacgagtaatgcggcggatcagatatcggccatatccaaaggacccggtgcggtccaccatgttcagtaccgaacgtgtggcaagaaaaccggtgataacgaaaaacatcgtcacgccaatgaatccgccctgcaatagcgacgggcgggtgtggaatgctatgactccaagaatcgccagagcgcgcagtccatcgatacccctgaaatgggcaggcacagacgatcgagatggtgcaggtttcaaggttatgctcacagtattctaagtgtactctcaggaatcgttaggtatactgcccggattacgcatatctcaggtagtgacctatgccgttatgacttatgacttccggcaacccacaccgaaaccgccggaatggtgacataatcagaaccatgattcttcatctgcatctggtccgtcacggacagacctatttcaaccgatacaaccgtctgcagggatggtcgaattcgccgctgaccgagtcgggcgtcgccgatgccgtcaaggccggtgagcgactgaaaggattgacgttcgccgccgcctactgttcggacaccacgcgtgcccagcagacggccgagaaaattctcgacatcaacgaagccgcgggtaacccgcgccccgcactcgtgacggacatgcacttccgcgagcagttctacggctactacgagggacttgacatggccatggcctggtacgccgcgggagcgccccacggcgtcaaaacctacaaccaaatcgtcgagaagttcgggttgggggcctcgcgtgattttctcaaggaagccgatcccttccacgacgcggaatccgatgaggaatattggacgcgcgtcgaaggtgcgttccgtcttatcgccgacaacccgaatctcaaggacggcgacgatgtgctgcagatttcgcatggcaacacactgcttagcctcggtcaccggttcggcggccctgacctcgatctgaacgaacgcccggccaatggttcggtaaccgtgatcgacttcgacaccgacaagccgttcggcgaagccgtgaccatcgtttcgtacggcaagtagcaaatagcaagcaatacatatcgaatagcacgtacggtccacggcggcacgccgcaaacgaaagcgtcagcaggacagcctttcgcctatagccgcatacgcccacgcgcacggttttcgccctgcgcatgcaatggtatgccaagaaatagggaaggagtgctacccttaggcgagtaagtgtgaccgcaaggaggaaacaatgggagtcggagagatcgctggcctgatcgcggccatcgcgttcgcagtattggccggtttcatgatctatccgctgatcaggctgggcaagatgtttgatcagatatcgcagacggtccgggagtccggtgaacacgccatccccgcgctggacgaaggcgtgaccaccgtcaagcaggtcaacaagtcgctcgaagacgtgaacaagatttccgccgcggcttccaccaccgccaacaacgttggtgcgttgaccgatctgtatggctccttcctcggtaagcccatcatcaagatcgcttccaccttctacgcgctgaaaaccacgggtcagtccttccttgcgaagaacgccgcgaaaaccaccgtcaacgacaccgccgagaagggggagtgatgttcaaacgcatcttctgggtcggcgtcggcgtggccatcggaatcgttgccgtcaccaaggcacaggcctatgtcaaggccaatacgcctgatgcggcacgccagttcctgcttggccccgatcaggacaatgtgccgatgaaaacactcgaagggttggtcaacgagttcaatgccacccgtcgagcccgcgaggctgagctcaaccgtcagtacatcgagcgcgccaactgacacgcgcatgccgccttgccatctagtcactgaatcagctagaacaaactaatcctcataatccagtcttttccaccaataccaggcgcaactgcgcccattacccaaacaaggagttcatccgctcatgcgcactgcggacatcgcaaagcgatacctcgattattttgccaagcacgaccatctcatcgtgccctcggcatccctgatttccccgaaccccaccacgcttttcaccatcgccggcatggtgccgttcatcccgtacctgatgggtgagcagaccccgccgaagcgccgcatggcctccaaccagaagtgcgtgcgtacgctcgacatcgacgaggtcggcaagaccacccgccacggcaccttcttccagatgctcggcaacttctccttcggcgactacttcaaggaagaggccatccactacgcctgggagctgctcaccacctcgcaggatgagggcggctacggcttcgaccccgagaagctgtggatgaccacgttcaccgacgatgacgaagcccgttccatgtggatcaacgagggcgtggaccccgagcacatccagaagatgggcatggaagacaacttttggaccaccggtggccccggacccggcggcccctgctccgaaatctacgtggaccgcggccccgccttcggcaaggaaggcggcccgattgccgacgagaaccgctacatcgagatctgggacctcgtgttcgagaactacgaggtcgacaacgtcaagtccaagaccgacctgcacatcgtgggcgagcttgagaacaagaacatcgataccggtgccggcttggaacgtctggcctacctgctgcagggcaagaacaacatctacgagaccgatgaggtcttcccggtcatcgaggccgccgagcagctctccggcctgaagtacggcgagaacgaggacgccgacgtgcgcttccgcgtggtcgctgaccacgtgcgctccgccctgatgatcatgtccgacggcgtgcgcccgtccaacgtgggccgtggctacgtgctgcgccgcctgctgcgccgcaccgtgcgctccatgcgcatgctcggcgtgaccgatccggtgctgcccaccctcttcccgacctccaaggccgccatggaggccagctacccggagctcaacgacaccttccatgaggtgtccgaatccgcgtatggcgaggaagacgccttccgccgcacccttgagaccggcaccacgattctcgacgtggccgtcaacaaggccaagagcgattccgccgagcccgtcgtggccggcgaggacgccttcaagctgcacgacacctacggcttcccgattgagctgaccctcgagatggccgccgaacagggcgtgaaggtggacgaggccaagttccgcgaactcatggccgagcagaagtcccgcgcccgcgccgacgccctcaagaagcgtcacaacgtggatctttccgtttacgacgacttcaagaagacgctcgtcagcccgatcgacttcctcggctacaccgacatgtccgcccgcgccaaggtgatcggcatcatgcaggaaggcaagggttccgtgcccgccgtgaccggcccggccaacgtcgaggtcatcctcgaccgcaccccgttctacgcggaggccggcggccagctcgccgaccagggcgagatcctgtccgacgacggcgccgtgctcgaagtcgacgatgtgcagaagcccatcaaggacctcatcgtccaccagtgccgtctgaccgaaggcacgctggtcgtcggcgccgaagtcaacgccaacatcgacctggcccgccgtggcgccatcgcccgctcgcacaccgccacgcacatggtgcacaaggcgctgcgtgaggagctgggcccgcaggccacccagcgcggctccgaagacgccccgaaccgtctgcgcttcgacttccagtggtccaaggccccggccaagtccgtgatctccgcagtcgaggagcgcgtcaacgacaagctgcgcgacaacctcgccgtgaccaccaaggaaatgaagttcgacgacgccatcgccctcggtgccatgcacctgttcggcgagaagtacggcgacatcgtacgcgtggtctccatcggcgaagacggctggagccgcgagctgtgtggtggtacccacgtggaccacgttggcaagatcggcatggtcaacatcctgtccgaagcctccatcggctccggcgtgcgtcgtgtcgacgccgtcgtgggccagggtgcctatgacttcaacgctcgtgagcacgcgctggtctcccagctgtccgacaagctcaacgctcgtccggacgagctcgccgagcgtgtgaacgccctgctcgccaagctcaaggaatccgatcgtcgcttggcctccatgtacgagtcccagctggccgcctcggttccggcgctggttgctgacaccaagaactccgcggccccggtcaaggtggccgtcaagaacgtgggccactttggcgcggtcgatgccctgcgcaagaccgtactcgacgtgcgcgcccagctcggtgaagacgcccccgtggtggtggcccttgccggcgtgaacgaggatgacaagccgatggtcgccgtggccaccaacgaggccgcccgcaaggccggcatcaaggccggtgatctggtgcgtggcgcagccaaggtcctcggcggcggtggcggcggcaagccggacttcgcccagggtggcggtgtcgatgcctccaagatcgacgaggccctcgaagcgctcaagcacgaggcgcagaaagcctgattccgccagtggtgtggttaggcgttgatttgggtaatgcccgggtcggactggcactgtccgacccggagcttacctttgcacatcctgctggcaacattcatgttgccggcgactatttctttgctattgacgaggtcctgaacgtcatcgaagacgaacatgtggaccatgtaatcgtcggactgcccctgcagatggacggtacagaaggcaaaagcgccaaaaaagcgcgcaggtgggcggccaatctggagaagaggctgcaagcagagagtgaagacagtgattctacggagtatcagattccgcaggtatcattgatagatgagagattgacaacagtcagtgcgcatcgtcagctgttcgaggcccataaagcttcgaacaagcacaggccggtggttgaccagcagtcggcagtggtgattttgcagacggcactcgaccgtacccgggagcagtgaggtatcggttatgaccgatgattttaacgagttctttgatgacaacacgcattgggtcgaacaggggtcagaaccaatgcgcggggccgagccgccagaaccgccgaaatcccgcagggagatgcgcaagcgacgtgcacagcgcaggcgcaagcgtatcagtggcattatcatcgctatcgccatcgtcgccctgcttatcggcggcggctatttcggcgtaaccaagctcatcgcatggcgcgacagccggagcaaccagtcgacggccatcgcggactatccgggaccgggctatggcgaggtcgaattcaccgtgagcgagggccaaggcgcggcggagatcgccgataatctgctcaaggccgaagtcatcaagtctactgccgcgttcaccagcgtggtcaacgccaatagcacgacactctatccgggaacgttcacattgaagaagcatatggccgcatccaaagtgatcgacgttctctccgacaccaaccaggcggcgggcttcctcgaggttcgtcccggtgaacgtgccaccgatgtgttcgccaacgccgcgaagctttccggcattgcccaaagcgaattcgacacgattatcaagaacaagggtaaggatattctgcccaatgaagcgggcggtagctttgagggatggctggagccgggaacctacaacgtcaagagcatgaagagcgcttcggaaatcctcaaggccatggtcgataagcgtatcgccaagttggatgaattgggcgtgccggccggcagtgaccgcgaacgggtgatgatcatcgcctctatcgccgaggccgaggtcaacaaagccgattactacggcaaagtgacgcgagtcatcgagaaccgtttggagcagggcatgtcgttgggcatggattccaccgtggcctatggcaataacgtcaagcccgcgcaggtgaccaccgagatgacccaagacgagtccaacccgtacaacacgtacaagatctccggcctgccgcctacgccgatcagcaatcccggcgataacgccattcaagcggcactgcaccccgaaggcggcaattggctgtacttctgcacggtcaatctggacaccggcgaaaccaagttcgccgcaaccgccgatgaacatgaccagaacgtggccgaactacgcaagtggcaagccgaaaaccagtagtcatcccgttagcttccttcgcttggggaagctgatcggacgttggtctcttcattggctccctcgccgaggggagctgtccgcaaaaaagcggactgaggggagcactgcagggaatgtaacgctcaacttaagcccggggctcccgcgaagcggatggaagaaatctaggacaacaccccaacagccaccgccacaatcgcgcccgccaatatcaccggcacatacggcaccttgcccgcatgtgccggtgatgtgcgttgtgggtcgaatcgcgtccacaaggcaatccatgtgatgccggcaacgcccatcgccagccaccagaccaccacaggcaacaggccaaacagtccgacagacaatcccataggtatcaaggcggtcacatcgccgaatcccaatgaccgaggcaccagcaacgccaacgcgaactggatcaggcaacatagcacggtgaacaacagcgcctgcaacagcacgaacaggtcgttcaccaccactccatacgcgaaatcggcggccagctgaagcaacgcgcccgcagccacccacgcgatcggcacccgccgatgacgaacatcctcaatggacagtgcaagcccacatagcagaccgggtagcgtgaacaggtatggcatggcttaacattaacccctagctagacgtacacatagacgtacacacatgaaacgagggaagttatgctgcgttggcagacggcaggggagtctcacggagaagcattggtggccatgattgaagggttgccggccggcgtgcgtattagcacggacgatatcgtttccgcactggcacgccgtcgacttggatatggtcgcggtgcccgcatgaagttcgagcaagacaaggtccgtctgctgaccggtgtacgccacggcctgaccctcggctcgccggtggccatcgaaatcgccaacaccgaatggccgaagtggaccgaggtcatgagcgccgatgcactcgaccatgacctgccgcgcgaaggccgcaatgcgccgctgagccgcccgcgcccgggccacgccgatctgaccggcatgcgcaagtatggttttgacgacgcccgcccggtactggagcgctccagcgcccgtgagaccgcctcccgtgtggctttgggcgaggtggccaagcagttcttggatcaggcgttcggcatccgcaccgtagcccacgtggtggcgcttggtggcgtgcagaccaaccccgacctgcctctgcccacccccgacgatctggaagcgcttgatgcctcgcctgtccgtacgctggacaaagaggccgaagcccgcatcatcgaacgcatcaacgaggccaagaaggcctccgatacgttgggcggcgtgattgaagtgctggcttacggtgtgcctgccggcatcggcacgtatgtggagtccgaccgccgactggacgcggctctggcctccgcgatcatgggcattcaggcgttcaagggtgtggagatcggcgacggcttcctggaagcctcccgccccggttcgcaggcgcacgatgagatcgtggtcaacgccgacggccgtatcgaccgtctgtccaaccgcgcaggcggcattgaaggcggtatgtccaatggccaggtgattcgcgtacgcggtgccatgaagccgattccgtccatccccaaggccctgcgtacggtcgacgtgctgaccggcgaatccgcacaagccatcaaccagcgttccgacagcaccgccgtgcctgcggcatccgtggtggccgaggccatggtgcgtctgactttggcgaagtacgcgctggataagttcggtggagacagtgttgccgaaacacggcgcaaccttgagtcgtatctcgcctcgtggccggagcacatgcgctgaacgaagggcgtatggtttcgtgacgactgccgcggaaccatcagcaactgtactcaccaatcgtcgagaggattcgtagattatgaccgcacgcccccgcgccgtcatcatcggcatgatgggagccggcaaaacacgtgtcggtaaggaagtggcgcatatgttgcgtctgccgttcgccgatgccgatgtggagatcgaacgtgaagtgggcatgaagattccctcctacttcgaggaatacggtgagccggcattccgcgaggtcgaggccgatctcatcgccgatatgcttgaggatttcgacggtatcttttcgctgggcggtggcgctcccatgacgccatccacccagcatgccctcgcctcctacatcgaccatggcggtcgtgtggtctaccttgatgccgatccggcggaagccatggaacgcgcgaaccgtgggggaggccggcccatgctcaatggcaacgccaactcccgttggaaaaaactgttcaagcagcgtgacccagtattccgcgaggtcgccaacgttcatgtccatacccgggggcttacgcctcagggcgcagcgaagaaagtgattgatatggtatctgagcgagcagtgcatgttaccggagcggcaattgagccgtatgatgtggtcattggcgaaggtgccatgaaccatctggtcgacgtgctgggacccaaacccgccaaaatcgcgcttatccacactcagccggtgcagcgacactccgatcgtgcccgcgccctgttgcgtcagggcggctatgaggtttccgacatcgtgattccggatgccgaacccggcaagaccattaccgtggccaacggcatttgggaacgccttggcgacgaaggtttcacccggtccgatgccgtggtggggcttggcggcggtgccgcaaccgatttggccggtttcgtggctgccacgtggatgcgcggcgtgcgctatgtaaactgcccgacctcgctgctggctatggtcgatgcctccaccggtggcaaaaccggcatcaacaccccgcagggcaagaacctcgtcggctcgttctacacgcctgccggtgtgctggccgacaccaagacgctggctacgctgcccaatgacatcttcatcgagggtctcggcgaagtcgccaaatccggtttcatccgcgaccccgaaatcctgcatatcctcgaagaccacgcagctgaactgcgcgctttcgacggctctacattcctcggctcgccgctcgaagacgtggttgccgagctcattgagcgcacggtaaaggtcaaggcctaccacgtctcctccgatttgaaggagaaggggctgcgtgaattcctcaactacgggcacacgatgggccatgccatcgaaaagctcgagcacttccgctggaggcatggcaatgcggtggccgtcggtatggtgtatgccgccgagctggcccatctgatcggttacatcgatcaggatctggttgactatcaccgctcgttgctcgcttcgctgggtctgccgacgtcgtggaatggcggctcgttcgacgacgtgctcgcattgatgcatcgcgacaagaaagcccgtggcaacgaactgcgcttcgtggtcctcgacgagattggtcacgtcgtacacctcgacaacccgcccgccgaagccgtagaagaagcattccgtcgtatccagcagtaattgaacggccgtaggccgtgccgttcgccatcccctcagaaaaaagtacttggctcccctctaacggaggtgccccggagtcggatctaccttctacctccctctgatgagggaggtgccccgaaggggcggagggagagaagcacaaacaaaaggagtcccaatgaccaaagtcatcgttgtcaatggccctaacctcggacgtctcggcgtccgccagcccgacgtctacggtcgtcaagacctcgacaccctgcgcaagctctgcaccgaatggggcaaggacctcggcctcgaagtcgaggtgcgccagaccgacgacgaagccgaaatggtgcactggatgcaccaagccgccgacgagaaaaccccggtggtcatgaaccccgccgccttcacgcactattcgtatgctctcgccgacgccgcgcacatggtcattgacgagaacctgccgcttatggaagtccatatttccaacccgtccgcccgcgacgagttccgcaagcgttccgtaatcagccctgtggccaccggcaccatcaccggcatgggtttctacggctacaagctcgcgctcgatgctgtggcgcacttgctgagcgaatagaaccaagccctccagccaatcccgggtagcagtcgacgttgcgcccgggattcctgttacctgaggaaaccataagcgtccaagtaaaggaagccatgactctcaccgccacggaacgtgatctcgtcgatgccgcgtcacgctggtttgacgcccaccgcgcacagttcgtcgatgagctgtgtgagctgctgcgctacccgtcggtttccgacgaatcggacccgaatcctcgtccgggcgcgccttatggacccgaagtacgccgtgtattcgaccatatgctggccaaggcaggacgagacgggctgcctacgcgcgactacaccggccacgtcatggaagtcgtttatccacaggagaacgtggagaccgaccgtgacatcgccttcgtcgaccacctcgacgtagtccccgccgacgacggttggacgcacgatgccttcgatccgcaggttattggcgatattgttatcggtcgcggctcattggacaataaaggcgtcgcgctgaccagctatttcctactccgtttcttcaaggaacacgaccaccgtttccgccaccgcgtacgtatactgttcggcggctccgaagagatcgcgctcaacgacatcaaatggttcgtcgccaacatcggcgcgccgtaccaggccatcgtcaccgatggtcccttcccggtgaacaatatccaaaaagggctgctcgatgtggatgtcgaactgccggtcgggccgcaattgcgcggttggcatgccggcaccgccactaacacggttcccggggccgccgcaatcaccctcaccggcgtcgacgaatctaccgtgcggcaagcattctgccagagcggcaacatcgctccagatatcgccgagcgattgcatatcaacgcaacagcgcaaggcgtcacgattgaggccaccggtgtcgccggtcatgcctgccagccgtccggtaccgtaaacgctatagcggtgctcactacggcgcttgcccggtccggtctgctcgaaggccgtgacctcactgcagcgcaggcgattgcccaatggacaaaagactcatatggcaccggcttgggtatcgattgcgagaatgcggaaagcggaccgactaccgccaatggtggtttgattataccggcgaatgagttcgctgaagcagacaaggtattaggcgcggtatcaggtgagacttctgaagatgccatcgtattgcacttcgacatccgttatgcggtaggccaggcacacgaataaatcatcgagcgtattcaagcacaagccgaagcggcgggcggccgcattgtcgacatccttaacgatgacccatactacgtgcaggctgacgacccgcgtgtccagttgctcaccgcaacctacaacgacgtgctcggttgcgaggctcgacccgtggctgtcggcgacggcacccacgcccgctttatcccgcgcgcactcaacttcggtcccgaattccatgccgaccatgtgccggcggtcgacggcatcgacctggagaccccgccattcatcgcaccaggtgccggcaacgcgcacggtgccgatgaatgggcctcgctgaaaaacctgaaaacagcgtttgtcctatatgcgttaggcctagtgcgtctcgaccaatacctgcaatagctggcggataagacgtttgacgtgattatgaccttgcgtatgctttttgacgagcctactattcgtattgttcaagtacgccatgtcggggccgacgcgtctggtgaacacgccgggtcatacacggatgatagagtgaaattccatggttagaagaacacatggtaattctcaagaacacgtcaccaagcatattttcgtcactggcggcgttgtctcctctctcggcaagggcctgaccgcatcttcgctcggtcgtttgctgcgcagccgcggtatccatgttctgcagcaaaagctcgatccgtacatcaacgtcgacccgggcaccatgaacccgttccagcatggtgaggtctacgtgaccgaagacggtgccgaaaccgatctcgacatcggccactacgagcgtttcctcgacgtcttcctgagccagaaggccaacgtcaccaccggtcagatctatcaggaagtgctgcgcaaggagcgcgccggcgaatacctcggccagtgcgtgcaggtcatcccgcacatcaccaacgaaatcaagtctcgtatgcgcgcccaggcttccgatgacgtggacgtgatcatcaccgaaatcggtggtaccgtcggcgacatcgagtcccagcccttccttgaggccgcccgcgaagtgcgccgcgatctcggcccggacaactgcatgttcgtgcacgtttccctggtgccgtacatttccgccgcccacgagctcaagaccaagcccacccagcactccgtgatgatgctgcgccagctcggcatttccccggacgctctcgtgctgcgctccgaccgcccgctcaatcagtccatcaaagacaagatctccctgatgtgcgatgtcgatgccgaaggcgtggtcaactgcgtggatgcgccgagcatctacgatgtgccgaagatcctgttcgaggagggcctcgacgcctatgtggtgcgtgagctcggcctgccgttccatgacgtcgattgggacgaatgggccgacctgctggagcgtgtgcaccaccccaagcacgaggtcaacatcgccatcgtcggcaagtacatcgatctgccggacgcctacctgtctgtcaccgaggccatcaaggccggcggctttgccaactgggccaaggtcaacgtcaagtgggttgcggccgatcgttgcgaaaccaccgaaggtgcggccgccgctctcgacaacgtcgacggcatcgtgatccccggcggcttcggcatccgcggcatcgacggcaagatcggcgccctgaagttcgcccgtgaaaccaagctgcctgccctcggcctgtgcctgggcctgcagtccatggtcatcgaatactcccgccacgtgctgggcattgaagacgcgaactcttccgagttcgagcccgattgcgccaatccggtgatcgccaccatggaagagcagaaggacatcgtggccggcaagggcgacatgggccacaccatgcgtcttggctcctacccggctgagctggaggaaggctcgctggtcgccgaactgtacggcaccacgcatgtcaccgagcgccaccgccaccgttacgaagtcaacgtggcctacaaggatcgtctgcgcgaaggcggcctgcgcatctccggccagagcccggacggcgagctcaccgagttcgtggaactgccgcaggatgtgcacccgttctatgtggccacccaggctcacccggagttcaagtctcgcccgaccaagccgcacccgctgttcgccggcctggtcaaggccgcgctcgaccatcaggcggcgcgctgacgcactttcgtgccgtgcataatatcgcggcatgatgtgctggctgccgtcatcggcgtagcgcaagacatacggtaaagacgtggtggcgaaatatctaatgatgtttcgccaccacgtcttttttgttgtatgagcagcatgcagcatgatgtattggaaggcgacggtaaaaaattaccgtttctatggtgtgttggtagtatgcagataacgcttagtaggccatcgcagaaagaccgaccatgaccgaacaccttgatgactcgacccagcagtttgcgcctctgtttggcgcgaataatgccgtcagcggcacggtggcagacagcgtggatgctgctgcatcagattccattcagggcgatgagatgaggaagcgccgcatctggccgtgggtggtgattgcttgtctgctggttgccttgggggctgcctgtggcggcggtgtttggttcttccaagatcacgtgctgcctggcacaacgctatggggaaattcagttaccggcaaaaccgagcaggagattgccgacctaatcaacgaccaggtcgacaacaccgcggtacgagcgaaataccaggggcagtcggcgacgttcacgctgaaagatctcggcatcgaagttgatggtgaagcaatcgcatccgatgtcatcaatgcccaacgcggtgacgcatggtggcaacagtatgcgttctggattacgcatgatgtggccccgcaaatcaatcccgagctcgctgatggcagtgtggtagataaggcgctgaacattgatgcacaagaacctgttgacgcgcaagtcgcattgaacgataacaacagtggcttcaacgttattgtgggagaaaatggccagggagccaacgccaccagcattgcgaagcaagccatttccacagtggagtcattgggcagtgtccagccacagaccgttcgggtggaactcgacgtaaccgaaccgacgattaccaatgcaattgccgatgaggcgaaaaccacgctggaaaccctagtgaacaatgccgtggccatcaaggtggcggataaagacatcgccaccgtgaatgcgtccatgctgggttcggccatgcgcatcgacgccaaccagcagtcaaagctgaaagacaatgaagtacgtaatggctacgtggtctttgatgccgacaagctgcagcaatactatgacgagcaaatcaagccgaatctcaaattggaacgtgaagacaagaaggtcgtcgtcaataatgctggcgaagtgctgagcactgaaacagaaggccatgatggcattgtgattgccgatggcgcggatacggaggttggtgctcgcttggctcaggtgctggccacgggaactggctcagtgaatgtggacggcaaggtcgatcccaaacaggaagtcaaggtcactcatcgcgtggtgattgacctgtccgaccgtaagctctatgcctatgagaatgacacggtggtcaagacattgaatgtcgtggtcgcggagggcaacgacaacgtcaccggcgaatgcgttggcatgatgtgtacgccgacaggtgacttcaacgtatggcaaaagttgcccagtcaagatatgagcggcacgctgaatcttgccgatggcacggtggaaacatgggatgtcaaagacgtgggcttcgtcaattacttctcctccggttgcgcaatccaccgtattgccggcggatatgtagcggatgccgtaatgccctccatcgccaacggatctcatggttgcgtgggtatcggatgggatgtggccgaatggttctacaactggtgcaatatgggcacgagcgtgcatatccaagtgtgatatgcaacagtgtgatatgtaacaaatacggcatgcagtggtgcgacacataatgccgcatacgcggtgttcggtgtgcatgggacaatcttgcccggctccaatatcgctgtatcgcattcgtgtaatcaagcccacagccaatatgcgtcagggcggctagtgtttgcacttgggttctgctaggttttcataggattaagtgtgatacaaggaaggcaggatggtgaccgaaaacacagcaccaaacgccgccgctgatgtggagatgagccagtatgtggctgatcgtacccgcgtcaacgaggataagatcagacaggatgacgagatcatccagcagttcggcgactacagctacggctggcatgattccgacgcggctggcgaagccgcaaaacgaggcattgatgagaacgtcgtacgcgcgatcagcgccgacaaaggcgagccgcagtggatgctcgacatgcgtctgcgtggattcaaggcgttcctcgaaaagcccatgcccgattggggtgtggatctctccggcttcaacgcagacgacttcaagtactacgtcaagccaatcgacaagcaggcgaaaagctgggacgaactgccggacgacatccgcaacacctacgatcgcctcggcatcccggaggcggagaagaaccgcctcgtctccggcgtggccgcccagtacgagtcggaggtcatctacaactccatccaggaggacctgaagaagcagggcgtcatcttcgtcgacacggacaccgctgtgcgcgaataccctgaactcgtcaagaagtacttcggcaccgtcgtgcctccggaagacaacaagttcggtgccctcaacaccgcggcatggtccggcggctcgttcgtatacgtgccgaagggtgtgcacgtggacatcccgttgcaggcatacttccgcatcaacaccccggccatgggccagttcgagcgcacgctcatcatcgcggacgaaggctcctacgtgcactacgtggaaggctgcaccgccccgatctggtccgaggactcgctgcacgccgccatcgtcgagatcatcgttgaaaagcacgcccgcgtgcgttacaccaccgtgcagaactggtcgaacaacgtctacaacctcgtcacccagcgtgcctacgtgcgcgagggcggcaccatggaatgggtcgacggcaacatcggttccaaggccaccatgaagtacccggcctgcatcctcgccgaaccgtacgccaaggcatccaccatgtccctcggcttcgccggcaagggccagtaccaggacacgggcgcgaagatgattcacctcgccccgcacaccagctccaccgtcgtcgccaagtccatttcccgtggtggtggacgctccgcctaccgcggtctggtcaaaatcgtcgagggcgcgtacggttcgtccaactcgaccgtgtgcgatgccctgctggtcgacgacttctcccgctccgatacctatccgcacgtcgacgttcgcgaagacgacgtttcgatggcccacgaagccaccgtttccaagatctctgaagaccagctcttctacctgatgagccgaggacttacggaggaagaggcgcgaggcatgatcgtgcgcggcttcgtcgaaccgatcagccgtgagctgccgatggaatacgcgcttgaactcaacagacttgtggaacttcagatggaaggatcggtgggctgattccgatgaccgacaacacaacacccgtcaaggaaatcaagattccggtcgccgaccccaacgacccgtacgcgattccggccgccatgccgtcctccgtggaccatgccgtgcgctcgttcaacgcaggcgactacccggagcccagccgcaagcaggacgaatggcgctacacgcctatcgagcgcatcaacgagttcttcaccgtgttcgagccttccggcgaaacgcagatcgaagtctccatgattgacggctcgccgttggccgaaggcgtgaagctcagccagatcaagctcggtgagggcctgtccggcactgtgtccaagcccaacgaccgcgtctccgcagtcgaatgggaatccggccacaccgcaaccattctggaactgtccggcgagatcgcccagcccgtgctcgtcaaggtgcacggcgcgggggaggacctcgacgctttccatctggtgatcgccgccgccgacaaggctcatgcggacgtcgtcgtggaacacgacggtgacgcacgactggccgaaggcgtggaaatcaccaccggcaaggactcgcacgtctccaccacgttcgttcaggaatgggccaaaaccgccaagcatgtggccaaccaccgcatccacgtcggcgaaggcgcatccctgcgccactccgtcgtgaccttgggcggcgacatcgtccgcatccgcatggatcaggacttcggcggcgaacagggcgacctcaacatgctcggcatctacttcgtggaccccggcgagcacatcgaacaccgcacgatggtggtacacaaccaccccgactgcaagtcccgcgtggtctacaagggcgcgcttgacggcaagggcgcgcactccacttgggtgggcaacgcgctcatccagcccaccgcccccggcaccgactcctacgagctcaaccgcaacctggtcctgaccccgggcgccatcgccgattccgagccgaacctcgaaatcgaaaacggcaacatcatcggtgccggtcacgcctcttcggtgggccgcttcgacgacgaggaactgttctacctcgaatcccgcggcatccccgaaaccgacgcccgcaagctcgtggtgcgcggcttcttcggcgaactcgtcgaggaaatcggcattcccgccatctccgaacatctgatgaccgtgattgaccgccgactggcccgtggcgaaaacgacgccatggcacaggtcctcgaagacaagtaagaacagcatttttaggagcacaacaatgtcaacactcgaaatcaaggacctgcacgtccacgtcgaaaccaaggaaggcatcaagccgatcctgaagggtgccaccctgaccgtccactccggcgaaacccacgccatcatgggccccaacggttccggcaagtccactctcgcctacacgttggccggccaccccaagtacgtggtcgactccggcgaggccctcctcgacggcaaggacatcctcaagatgactccggacgagcgcgccaaggccggcctgttcctggccatgcagtacccggtcgaaataccgggcgtgtccatgaccaacttcttgcgcaccgccaagaccgaaatcgacggcgaggctcccggtattcgccagtgggccaaggacctgtccgcagccatgaagcgcctcaagatggacccgaagttcgcctcccgttccgtgaacgaaggcttctccggcggtgaaaagaagcgcgccgaagtgctgcagctcgaactgctgaagccgaagtttgccgtccttgacgaaaccgactccggcttggacgtggacgccctgcgcatcgtgtccgaaggcgtgaaccgcgccaaggaagccaaccagttcggcatcctcatggtcacgcactacacccgtatcttgaagtacatcaagccggacatcgtgcacgtgttcgccgacggccacttcgtcaagaccggcggccctgagctggccgacgaactcgaagagaacggctacgaccagtacctgcccgaaggcgccgactccgagtccgcactggcctgagtccgtgaccgtgggagtctgacatgccctattctcgacacgctccgggccgctcaggccaagtctttgctgtcgcgaacaggccatgtcagactcccactcgtttcgtacaattgttacgtaagtagggggaacataatggttgattttaaggagattcggggcgagttcccgattctggatcaggagattcacgggcacccgctcgtgtacctggattctgcggccacctcgcagaagccgaatgcggtgatcgacgccgaggcgaacttctaccgtacaattaacgccggcgtgcaccgcggtgcccacgagctggcggcccgtagtaccgtggccttcgaagaggcccgtgtcaaggtcgccaagctggtcggtgcgaatgcggccgaaggtgaagaggaggtcgtcgtcaccggtggtgccacggccggactgaacctgctcgccaccgcattcggcaatgcatcgctggggcgtgggggagaagccgccaagcgttttgccctgaagccgggcgatgagatcgtcgtctcgcgtgcggaacatcattcggtgctgctgccgttccaggagctggcctaccgtaccggtgccaccttcaagtggatcgacctgaccgaggacggccgtgtgcgtacggacaacctcgacgaagtcatcaccgagcgtaccaaggtcgtggccgtcacccacgtgggcaacaccacgggtgccatcaccaacatcgcccctatcgtcaagcgtgcgcatgaagtaggttcgatcttcatcttggacgcttgccagtccgtaccgcacctcaaggtcgatttccacgcgcttgatgtggacttcgccgtctggagcgcgcacaagatgtacggtcctaccggcgtcggtttcctgtatggtaagcgtgaactgctcgaagccctgcctccggccaacttcggcggctccatggtcgagctcgcctacatggaccacgaggcccaatacatggcccctccggcccgcttcgaggccggcacccagccggtcgcccaagtggtggccgcaggcgtcgccgccgaatggatgatgaacatcgggctcgagaacatcgaagcccatgagaagaccatcgccgccgaactgctcaagctcggcgacgtcgatggcattcgcatcctcgggccgcgcgaaaacgtggaccgtatcggcaccgtggcgttcgacgtggccggcgtgcatccgcacgatgtgggccagttcatcgacgcccagggcatcgcgattcgcgtgggacaccactgcgcccagccggtacaccgccacttcggcctatacgcatccaaccgtgcctcctccggtgtctacaattcggtcgaagatgcccaagcgttggtcgaagcggccaagggcatccgtaagttctttggagtggagtaaaacagaacaccatgaacgaattcggtatgagcggggatgacctcgaacagatgtaccaagaggtcatcctcgaggcgtcgaaacatccgcatggcaaggaatcctttgcgcccaacgcagcggtcgaacagtccgcggacgcagcggccaatgtcaccgtgcaagccagccacgaatactgcacgcccggtgaatcgcaccagttcaacccgacctgcggcgacgaggcgaccatccatgtcgaagtctccgatgacgaaccgcacaccatcaagcgattggtgtgggacggccacggctgctccatttcgcaggccagcctgtcggtgatggtcgatctggtggacggcaaaaccgttgacgaggccatggatctggaacagacattccacaagctgatggaatcgcgcggtgccggtctggacgacgagaacctggaagaaaagctcggcgacgccgtggtattccaaggcgtgtcgaaataccctatgcgcatcaaatgcgctctgctaggctgggaagggctgaaggactccatcgccaaagccctcgctgcaaagaactgaggaaatatgtccaacgataatttggttcccgaaccacagccgtccgttttcgatgccgtcaacggcgtcctgcaggacgaggaggccgctcgccgcgtgatggccaacccggccttggccaagggcttcccgaacggacgcccgatcgagcactctgctgcgtccggcgatgacacctgtgcgtgtggcggtcaccacggcaaatgcggttgccaggatgacgaacagtccgatggcagcgagattccgatcaaggcgattgacgatatcggccgcgccactgccgaagacgtgcgcgaggcactgcatcaggtgattgatccggagcttggcatcgacgtgatcgatttgggtctggtctacggcattgagatcgatgagctaggccgcgccattattacgatgacgctgaccacgccggcctgcccgctgaccgaccttatcgaggacgaatgcgcatccacgctggccggtctggtcgaggagttccgcatcgactggacgtgggatccgcgctggaccatggagcgcatcacgcccgaaggccgcgaccagctcgccgccctaggcttcaacttcgacaacatgccaaagtactgatagcgcttagtaagctccctcatcagagggagctctatacgagaaaagccccgcatgatgcggggcttttccatgtctggactggtcaatcagtcatcgacgatggtgttcttcgggacaaccgtgatgccatccggcgtgacggtgaagccacgggccagatcgtgctcggtatcgatgccgacagtggagttctcggtgagcaccacgttcttgtcaagaatcgccttgtacacgcgggcgcggcggttgatgactacaccgtcgaacagcacggaatcgacaatctgtgcccacgagtggatacgcacattgggggagagcacggagtggtgcacttcaccgccggagacgatcacaccgggggagacgatcgaatcggtggcgtggcccagacggtcgcggccggcgtgcacgaacttggccggcggcaggttgccggacatcgtgtaaatcggccaatcctggttgtacaggttgaactcgggcacataggcgatcagatccatgtgcgcatcgtagaactgcttaatcgtaccgacgtcgcgccagtaagcgtgatcagtggccgtggagcctggaatctcgttcgagttgaagtcgtagacgccggcttcgttgcgggaagcgaagtacggggcgatgtcgccgcccatgtcgtgcttggtgtcggcagccttctcatcgagagccagagcctcgaacagggccttggtgttggcgacgtagttacccatggaagccagaatctggttcggattgtccggcagaccggtggtggtggccggcttctcctggaagttcttgatcatgttcgggtgatcgggatcgacctcaatcacaccgaactggttcgattcctcgatgggctggcggataccggccacggtgaactcggcgccggactcgatgtgctgctgtaccatctgctcgaagtccatgcggtagacgtgatcggcacccacgatcaccacgatgtccggctggacatcctcgatgatgttgatggtctggtagatggcgtcggcggagccgagataccaatgcttgccgagacgctgctgcgcgggcacaggggagacgtacgagccaagcagcggggagaaacgccagacctgggagatgtggcggtcaagcgagtgagacttgtactgggtgagcaccacgacctgacggtacccggagttcaccaggttgctcaacgggaaatcaatcagacgatacacaccaccgaagggaacggcgggcttcgcgcgatcacgggttaacggcatcaggcgggtcccctcaccacctgcaagcacaatcgacagaatcttgggattcttggccatcgtaactgtcctctctgttactgagcgtctttcgacaccgcactgctgggccggatgcttccttgcattcggtttacatagttaataattgcagaaaaattcgaacatgcaaggttttcgcccccgcgtgccgtgaacttgcgatgaacagtttcgtagatttgttaaggatccggccttttcggagcgcgtgcgattccttagcgtgtcgcgtagaacgccactgcgctggatgccgccacgttcaggctatccacgccgtggctcatcggaatcttcacggtcaaatcggcgcgggcaatcgtatggtgagacaggccgtcgccctcggtaccgaagatcagcgcgagcttgtcgatatgcgtcggatcttcggcaggcgcgtgcagacggcgtgtcagttcgtccaacgaaatcgaacgatcctccaatgccatggccacggtggtgaagcccagcgacttcaactcgtcgatgccctggaacggccagtaatgcttgttttcggtgccgtcgtcgttgaacccggtgatacgggtccacggaatctggaatacggtgcccatcgacacgcgggcggcgcgtcggtacagcggatcaccgcaggagggtgtgaccagcacggcatccacatcgagcgcggccgccgaacgcatcagtgcgcccacattggtgtggtccacgatgttttccattactgccacgcggcgggcgctcttgcagacctcggctacggagggcaacggccagcgtcgcatcgcgcatagggcgccgcgatgcaaacggtagccggtcagacgcttgagctgctcaggtgaggccacgtagacgggaatatccgcgccccagcgcccgtcgatgaagtcgaaggtgtctttcatgccctccagccaaggttcctcgaccagcagtgacagcggttcgcggtcagcggccagcgcgcggtcgataaccttgggggactcggcgatgaacacgcccttggctggttccaagcgattgcgcaactgcatttcggtgaggctcacatacgcttcgacgcgcgggtcgtcgacggtgtccagcgtgatgaactgcattggtggcctttcgtgtgtgcagataacgaaaaaccccttgcaatgcaaggggtttatctgtgcccgagacgggacttgaacccgtacgcccgtataaaataggcactagcacctcaagctagcgcgtctaccattccgccacccgggcaggtgtcgtttggacaacgagtagatagcttagcatgaaattacagggatgcaattcgcgcgtgtgcccggcgtgtcgcgtgtagccttgaagtcatgactgatgccctttttcttttcgacccgcaggtcgacgacgtcccggtgaacagcgacgaactccacgccggctggaagctaaccctgcccgctcacatcaagcgccatgccgtgcaggccatgcgactcaaggcaggggacaacctgcaactttccgacggcaacggcttgagaatccaggcagtgatggccgatcctgaagccggactggctgaagtcgtggaagtggggcgcgaacccgagccgctcacccggttggcgctgattcaggcattggcgaaaaccggccatgatgagcaggccatcgatatggctactcagatcggcgtcgaccaagtggtgccatggcaggcggaccgatccattgccaagtggaaggtcggccgtacagacaagaagtggaattcggtactggatgccgccaccgagcagtcgcggcgcgcctttaagccgcaactggaggcgtgtgcgtccagcaaggaggtcgtggccatctgccgcagggcctgcgtgcatggcgatgtggtgattgtgctgcatcaggatgctaccgatacgtggtccggcgtggaggagaaggttgcgcagttggtggaacgcacgctccaggacggccggccgcggactgtcagtgtggtggtcgggcctgagggcggcatcagtgagcaggaggtagctgatttcgtcaaggccggagcggtgagctgcgtactggggcgcaatattctgagagccgcgacggccggtccggtggcgttgtcgctgttgtctcgggtgttgggacgttacgagtaacgcccacgcgctaagctggtgcgtagcaacatcaaaccaaggagcatgatgagcgaatccgacgattgcctgttctgcaagatcatcgcagggcagattcccagcagcaaggtctacgaggacgagacgacctacgcattcaacgacatcaatcccaaggccaaggtccacgtgctcgtggtgcccaagaagcactacgccaacgtcgccgaacttgccgccgatgacccgaccgagctggcccacatcgtctccatcgcgcagaacatcgccgacaaggaatttcacggcgcctaccgactggtgttcaacaccggtcttgacgccggccagaccgtcttccacgtgcacgcgcacgtgatgaccggcgaaaagctcgacgagtagtaggggaatatccgcttcgtggcaacgactacacgtaccatcaccatcccgccccagcttgaccccgtcgccgtgctcggcccggttgacgaggtcattcgcgaggtggagcgcgcctttccggacctgacgattatcgtgcgcggcaaccgcgtggcgatcgtctcccgctccaagcagaccgaagcccaagccgcacaggccgaggatttggtcaacaccatcatccaagccgcctacaccgcgcctatggacgccgacactgtgcgtcgcatgctcgaccagaacgtgctcaagaaccacgtgcgcctcgaacatcccggtcacggcccggtgcgtgacaaactggcgcaatcgacctcaaacgaacgcgcccatgcacgttctgccggctcccacgacccgacgtaccgtaagcccacggttcccggcgtcatcacctttgctgccggcgtgccggtccgtgcgaaaaccgccggacaagtggcctacgtgaacgccatcgaatcgcacaccatcaccttcggcattggccccgcaggcaccggcaagacgtatctggccgtggccaaggctgtgcgtgccttccaggacaagcagattcgccgcatcatcctcacgcgcccggccgtggaggccggcgaaagcctcggctttctgcccggcacgctgaacgacaaggttgacccgtatctgcgcccgctgtacgacgcgcttggcgacatgctcggcgccgaccagctcaagcggtacatggacgacggctccatcgaagtggcgccgctcgcctacatgcgcggccgtacgctgaacgacgcgttcgtgatcctcgacgaggctcagaacaccaccgaacagcagatgaagatgttcctgacccgtctgggcttcaacaccacgatggtcatcaccggcgatatctcgcaggtggacctgaccgtgccgcgctcgggactggccaccatcgaacgcatcctgggcggcatcaacgacatcgcattcgtgcatctcaaaaccgaggacgtggtacgtcaccagctggtcggccagatcgtggccgcctacgaccgtcactccgccatcgccggcgaccaccgcgacatcgaacgcaagggccgccgcaaccataccgacttcgatgcccgccagcaagcggattcaaccaaccaaagcgagacagacgatgagcgttgacgtcaccaatgaaacccagtgggtcatcgaccccaaggtcttctccgatttgggtatttgggtactcgaccagatgcgcgtgagcacccagtccgacctgaccatcatgttcgtggatcccgatcccatcgccgaactgcacatgcgttggatgaacctcgaaggcccgaccgacgtgatgagcttcccgatggacgagctgcgccccggcgacggcaaaaccgtgatggaaggagtgctcggcgacatcgtcatctgcccgtgggtcgccgcccaacaggctgccgcagccgggcacagcaccatgcaggagatgctgttgctcaccatccacggcatcctgcacctgctcggctacgaccacgtgacccccgagcaggagcgccagatgttcggcctacaacgacagctgctgctcaccttcttcgccctacgccacgatgccaacgtgcaggccacgctgcccgccggcacacccgacgcgctggccctgtacgacgccgcgcacggtgctggccgcgacctcgattccaaataagctcccaaatcaatcacaccaaatccggattattcgataccgttcaaggacattcaaggacaccgaaaaatcattatggagtattccagtaccacgccgatcgccatcaccgtcattctcgtactcgtggcggccctgttcgtctggctctcgctgaccatggccgccgctgaaggcgccgtggcccgcgtaacgcgagccagcctcaacaatctcatcctcgaggtgcagaccgactccgaagcaagccagttcctcaagatgaagaagatcgacaagattcatcgcgtgcaacggctcatcgccgaccgttacgccaccgccggcagctgtgcgttcttccgcatcgcctgcaatgtgctcgacggcgtactggtgtcttccatcgcatccctgtggggtgcggaactgtggattgaactgctctccggattcctgttcgcgattatcgtagccgtggtctccgtactggtccgcccgcgcaccgccggcatggccaagccggtcggcatcatgatttccaactcgcgcatcgtgtcgttggccaccaagctcacgccgttcgcacgcatcggtggcgacaagtccggttccaagggaccgggccgccgctccaaggactccgatctgtccgacgacgaggagcttgagaagattcagctcgagcagggcaaggccgccatcgaccgactggtggagtccaacgacttcgatccggaagtctccgaaatgttgcgcaacgtgctcaccctgtctgatacgttgactcgcgagatcatggtgccgcgcaccgatatgatctgcatggagcgcgactccacactgtcttccgcgctgaaactgttctcccgctccggcttctcccgcgtgccggtgatcggtgaggatgtggatgacctgatcggcgtggcctatttgaaggatgccgtgcgtgccaccgccttcaacccggcggccatggagcgcgcggtcgaatccatcgtccggcagccgctgcttgttcccgaatccaagccggtggacgacctgttccatgagatgcagcgttcccgccagcatgtggccgtggtggtcgatgagtacggcggcatcgccggcatggtgactatcgaggatgccatcgaacagatcgtcggcgagctggaagacgagcacgaccgcacccagcgtactgagccggagaaaatcggagacaacaagtggaagatgcccgcccgtacgccgattgccgatctggaggagatcttcgagatcgacattgatgaggacgatgtcgataccgtgtacggcctgctgaccaagattctgggccgcgtgccgattgtcggtgcctcggccgtgacgcgcggtctgcgactgaccgccgtggactccgccggacgccgcaagaaggtgtccaccatcgtcgtagaaccggcgcacgtcgagggcggcgaggaaaataacaagacccatgaggaaactgacggcgagcccgtcgaaggcgatgataccgccagcaaggagtgatatgaccgaccagaacaacagcacgaacgacgtcgatgacattgacgttaccgatgcttccgatgttgccggcgttgccgaagccgacgcgaccggtgagacggagaacgtgaccaagcaggacgtgccgtatcgctccggattcgtggccgtggtgggccgcccgaacgtcggcaaatccacgttgatcaacgcgttgatcggcaagcagattgccatcgcatcctctcgcccggaaaccacccgtaaggcgattcgcggcatcctgaccgccgaccacgcgcagctcgtgctcgtggacacgcccggtattcaccgtccgcgtacgttgctcggccagcgtctgaacgacgtggtcgacgaatctctggccgatgtggacgtggtggccttcctgctgcccgccgatcaggaaatcggccccggcgacaagcgtattctctcccgactgcgtaccgacttcgccaccaagcgtgaggacggtacgttcaagtggcgcatcccgctgattgccatcgtcaccaagatcgacgagcttggccgtcagcaactcatcaacaagctcatcgaaatcaacgatttcgccgatttctcggacatcgtgccggtgagcgccctgaagcacgacaatctggctgaagtgaagaacgtgctcattgagcacacgcccgagggtccgcagatgtacccggacgatcagatcagcgaggagcgtccggaagacaccatcgccgaactcgtgcgcggtgcgttccttgagaccctggacgacgagctgccgcattcgctggccgtggtggttgattccatcgactatccggaagacaacgagaccggtcagggctatgacggcaaggcgcaggtcaacgtgtccatttacgtggagcgtgactcccagaagccgatcatcatcggcaagggcgcctcgaacctcacctacgtcaagaagaagctgcgcaccccggtcaaccgcatcgtcggccaaaaagccaagctcgacctccacgtcaaggtagccaaaggctggcagtccgaccccaagcaactagaacgcctcggcttctagggcgtatagacgaaaaaagctccctcgtcagagggagcttttgctatacggtttacttccgcttggtgtacatctgggtgttgaggagggtggagtagcgcttgatgaccttggggcgaatcaccttcatggaggcggtcatgaggccgttctcctgggtgaactcctcgggcaggatgatgaacttgcgcacggactcggcgcgggagacgccctcgttggcctgattgacccactgctgcacttcggcgcgcacggcggcgttccttgccgcgtcctcgagggacatgttctcgtcaagccccttggcggcgagccacgggcgcaacgacttctcgtccaacgtcaccagggcggagatgaacgggcgtttgtcacccagcaccaacgcctgggagacgaactcgcaacgctggatgacttcctcgatcgggccgggggagacgttcttgccgccggcagtgatgatcagatccttcttgcgcccggtgatgtacaggaagccatcgttgtcgatacggcccaagtcgccggtggcataccagccatcttcggtgaacgacagctcagtggcctcgtcgttcttgtgatagcgcgggaacacggcacgacccttgacctgaatttcgccgtcctcggcgatgcgcagggagaatccggggaatgcgatgcccacggaaccagcgtggaacggcgtacccagcgggttgaacgcgcacggcgcggtggtttcggtcagaccatacccctcgtatacaggcacacccgcgccacggaagaaagccagcagttccgggtcaagcggggcaccgccggccacaatccacttggcgcgaccgccgagcacttcgcgcagcgaagagtagacaatcggatcgaaggcagcgcggcgagtgcgggtcagtgcacccgccttgccattggcggagacttccttcatatagttctgcgcggccaccacggcggaggcgaacaccacgcccttggggccgtggccggccttctgggacgcggcgttgtacaccttctccagcacgcgcggcaccacgatcatgagagtgggcttggccacctgcagatcgctgatcagcgtcttgatgccggtggcgatgtagatgcggacgttcgaggagacgacaatgtagttgatggcgcgggcgaaggaatgggcctgcggcaggaacagcaggatggtgttcctcttgtcgtgcagcagatcgggcatgtaggccggcagattcagcgcggtctggcagtagtgctcgtgggtcatctccacgcctttcggcgcggccgtggaaccggaggtgtacacgatggaacacaggtcggtcttcttgaccgaatcgatgcgctcgtccagctcctcgtccgagaccgtggtgccgtaggccttgatctcgtccaagccaccggtctcgatggtgatgatgtgctccagggacgggcactcttcgacggccccatccgccttcttacgcatgtccgtgtcctgcacgatcagcagtcgggcatcggagttgttgacgatattgcgaatctgctcggcggaatcggtgtcgtagatggtggcgagcacgccgccgcacgccatgatcgccgcgtcggtcaggtcccagtcgtaggaagttcggcacatgaatgccacggcatcgcccttcttcaggccgtaatgaatcaggcccttggccacggcacgcacgtcagccaggaactcgttggcggtgacggtcacccaatcgttgccggacttgtaggtgtacagcggctcatcgcccatacgttcggcgcggtccgcatacaggtcgtagatggacgtaccttcgtccagcggcggattgccttcggtggaggtggtgagcaggccggtgacggggtcgatgtcggtgacggtcaggtggccgtcgtcccaatcgtcgctgtgaggcaaagcgatattggcctcgaccggcacgtcggcgttagacaggtaatcgggctcgtccggagtgtcgtcgtggaccgggtggacgaagtcggatcccaacctgagcgccttacgggtgagattgatagtgtgctgcgtgaaggaattgataaccgacaagtcttgctcctgtaaacctttcagtgtcgtccagccatgaggcgaacgcttctcaaagttcaaattgtaatcgcccaaaccgaactcgtcaccttacgcaaccgtaggattctggctggttaggggagcgcgtggcaaaatattgcacaggttccgatattgttgagtaaccgtgagctgcgaaacggcgattgtcgataattattgagcggttggttgctgatcgatgccgggtgattgttggacggcttccgagcaattcatccgcaatgcacatggacacattcgtatttcttactaatttcgggttcgtttctatttcgattggcggaatctcaagtcatggtctttacctttcgactacacttaccatgcggataaccatgtccattttgaagtagaacaagaaagggctctcatggcgcaaaacccagaagccaccgtggtgttcggcgttttgaacgaaacgtccgaaacggaatcccgcgtcgcgctgacgccggatatcgtcacccggctgaagaggagcggtgtctcctcactgattgaagcaggtgccggcattgctgccgactacaccgatgaggattacgaaaaggccggtgcgaaggtgaccagccgtgacgaggtgctcgccgaagccgacgcgctcggttttgtggaccgaccgtccgccgagaccgtggccaagctcaaggccggccagtgggtcattggcatgctcggttccttcaccgatgccgattacgtggccgcgctcgagaaggccggtctggtgggcatcgccatcgaaaagctgccccgtaagctttccagcgcccagtccatggatgagatgacctctcagaactccgtgatgggctacaaggcagccatcaccgccgccgatgcttacggttccttcctgccgatgatgaccaccgccgccggcacgattcgcccggctaaggcgctggtgctcggtgccggcatcgccggcctgcaggccatcggtacgctgaagcgtcttggcgcggtcgtcaccgcgtacgacgtgcgtcccgcctcccagggcgaggtcgagtccctcggcgcgaagttccttgatctgggacttgacttctccaagggccagggcgagggcggttatgcccgcgcgctgagcgccgaagagcaggctcagcagcaggctgccgtcgacgaaaaggccgccggctttgacatcatcatcaccaccgccaaggtcccgggccgtaagcccccggtgctgctcaccgcagccggcgtcaagggtctcaagcgtggtgccgtgatcgtggactgcgcagcatccgacctcggcggcaacgtcgaaggctccgccgttggtgagcaggtcaccgagggcggtgtcaagctgatcggcgctccctacctggcctccggcgtcgccaccaccgcatccaacctgctttcgcgcaatgtggccgacatcctcgtgcacttcgtgcgtgacggcaagctcggccaggatctcaccgaagaactcgacgacgcgctggtggttgccggccgcgccgccgccccggcagctgctgccgatgccgagaagtccgagaagtaaggaagaaggaataccatgcctactctcgtcgtttccattaccctgttcgtcctcgcgctgctcatcggcatcgaggtcatcggcaaggtgcccgccaccctgcacacgccgcttatgtccggcgcgaactccatccacggcatcgtcatcgtcggcgttgtgatcgtggcagccgaagccaatagcccgctggcctacgtgttcatcttcctggccgctgtgctgggcaccatgaacgtcgttggtggctacgtggtcaccgaccgcatgcttgagatgttcaagtccagcaagaacgagaagaagggggagtcgaagtaatgacctccgcaaccgttggcgccatcgacatcgtcgcttggttcgtctacctgttctctgccgtcctgtttgtggtcggtctgcatttcatgaattcgccgaagaccgcccgcaagggtaaccagatctccgcgttcggcatggtcgtggccgtgctcatggcgttcatcgtgctcttcgccaagggcttcgtgaacattgtcgccgtggtggtgctggtcgtcggcatcctgatcggtgccgtggccggtgtcgtctccgccaagaaggtgaagatgaccgatatgccgcagctggtctccgtgttcaataccgtgggtggtggcgccgccgcactcgtggccctgaacgacatcctgaccaaggaaggcaccccggacatcgtggtgctcatcaccgctggtctcggtattctcatcggttctgtgaccttcaccggctcgctcatcgctgccggcaagctgcagggtatcaagtgggtcaagaagctgaacctgccgggcaagggcgtatggaacattctgttcgccgtgctgtccgtcgcctcgctggtcatgctgtgcgtccagcccgaacagcgtctgctgtggtcgattctgaccaccgtgttcgccctgtgctacggcttggtcttcgtgattccgatcggcggcgccgatatgccggtggtgatctccgtgctcaacgcctgcaccggtacggctgtggctatgtccggtctggcgattgacaacgttgccctgatcgtggccggcgcactcgtcggttccgcaggtgtgaccctgtccatcctcatggctcaggccatgaaccgcccgctgctctccgtcttggccggtggcttcggcggtggtgctgacgccgccgctgctggcgacggtccggaaggcaccatgaaggagaccacgccggacgatctggccgttcagctcgtctacgcgcagaaggtcatcttcgtgcccggcttcggtctggctcaggctcaggcccagcgcgagctcgccgacctcggcgaactgctcaagggccacggcgtggaagtctcctacgccatccacccggtcgcaggccgtatgcctggccacatgaacgtgctgctggccgaggccaacgtgccctacgaggagctcgtggatctcgatgagatcaacccgcagttcccgcaggccaacgtggctctggtcgtcggcgccaacgatgtgaccaacccggctgctcgccgtcccggcaccccggtctccggcatgccgattctcgacgtcgacaagtcccagaacgtcgtggtcatgaagcgcggccgcggtatgggctacgccggcatccagaacgagctctacttcgaagacaacacccagatgctgttcggtgacgcgaagaagagtctgcagtccgtcatcgccgccgtcaaggaattgctcgcgtaaccattcttggctcccttctgtgaggggagctgtcgaacggagtgagactgaggggagtagcccatacacgggtgctcccctcagtcagcttcgctggcggctcccctcacagaggggagccgagctctatatctactacagcccaaacacccgcttaacaaagctgttaacgcgacgccaatagcggtccggatcggtgctggcgctcatcgtgtggtcggcgccgggaatcagcagcttctcgcggtcgatgctggcgcaggcgttgtaattgatgtccagatacttcggattgacaaaagtatccgctccaccatgaatgaacatcatcggaatagtcgcgtgccgtaatgccttcacacaggaggcgtcctcaaaccggtatccagccttgcgttcagacacatgactggccactttgaccagcagcacggccaacgagtgcggcaaacggaacatcgcctcggcattatccgtaaactgcgagaccacggaactgtatccgcaatcggaaatcgcggcgacgacgttgcgggggagtcgcgcatcgccggccgccatcatcaccgtggcggcgcccatcgaattgccatgcaacagaatgcgtgcatccggatcagctgcggtgatcagcgaaacccagcccaacagatcgtcgctttccagcaatcccatacccacgtaacgcccttcgctcaactcatgggcgcgctgcgcgggtagcaggaccgtaaaaccgagttgcgcatagcgatgcgcccatttggccatttccgcgggctctccggcatagccatggcagcagatcgcgtatagatgcggctgtgggtcggaacaatccgggtccaacagccagccgtggagtttcaatccatcatggctgcgcagcgtgaccgattgcttggcctcctcgaaccaccgggcggcctcaagctgctcggacatgtcgaattcgatgcctttcggtgtctcctcgtgcggcatgttgaacatcgaacgtttggccttggtgtccagcgcgaacgtgaacatgacgttggcggccgcggctgtgacgccggctcctgtggcggctatcgcggcaagtgccgcagccatacccctgacaacgcgagtgtgtgtggcgatgacgtcatggccatcctcattgatgacgtcgtccgaacgagtcatatcaacctcccgatacggtactcaccatcgtacgttattttcgaaatcatccccaacttcgtgaaagaccgtacactgagtgtcgctgagcgtacgatttcgcggaaaccgtacgatgagaacgggtaagcgtacgttcttcacaaagttagggattatttcgcggaaaccgtacgttgacgtggctgggacggccgggatgcagtgtcatcgaagcatcaccgcgccaaagtccggagttggcgtatacttgacaattgttgctttggcgagggaagtgtgcgtgctgacacatgacacagcttccgttatcgactcggtgtatttcactccttgtagggtgtctttcggcgtgtcgtggcgtctgagcgagacagaacgaaacgaaactacaaggagtatccattatggctaccaccattaagcttgagggcgaggcccgttccgagttcggcaagggcgttgctcgtcgtctgcgcgttgccaacaagattccggccaccatctacgccggcggcgaagagcccgccttcgtgaccttgccgatgcgcgagaccaccctggccctgcgtcacaccaacgccctgttcaccatcgccttcgacggcaacaccaagatggccgtcgtcaaggacgtgcagaagaacccggtcaagcgcatcatcgagcacgttgacttccttgaggtcaaggccggtgagaagatcgacgtcgaggtgccggtcttcgttgaaggcaccccgaagggcgctgctgtggcattcgtcgacattcaggagctcaaggttcgcgctgacgtcgccaacctgcctgagaagatcgttgtgagcgtcgagggcctaaccgacggcaccaaggtgttcgctaaggacgttgttctgcctgaaggcgttgagctcgacgttgaggacccggaagagtccgtcgtcaccgttgaggtgccggaagatgcttctgagtccaccgccgctccggaagctgctgctccggctgccgacgctgctgctccggctgccgacgccaagtgagtcgatcgcttcgatagcgaacaattcagaacataactgaaacgtggaagcccgcagccgttgagaacggtgcgggcttcttcgttttttcaccatgtgaactctgccacacgagtaacacatgggtgtgcaaaagtatgcaacagagctcgcgccacaagcgcacagcacacaccccatatggtggctttcgggccgccaaagtcaagaagaagtagctagtaatgactgaaaacacgcaccacgatccggcagcgctcgacaagctcgccgaaccgttcaccgtactgccgaacgacaaccccgcatccgatgagaagcgtcagtccctcatcgacaagccggctttcggccaggtgttctccgacaacatgacccacatgacctggaccaagggcgaaggctggtccgaccgccgcgtcgaaccgtacgcaccgctcaagatggatccgggtgcttccgtgctgcactacgcacaggagtgcttcgagggcctcaaggcttaccgtcatgccgacggctccacctggctgttccgcccggatgcgaacgccgagcgtttccagaactccgccaagcgtctgtacctgcctgagctgccgattgacgacttcctcggttccgtggccgcgctggtcaagcgcgacgccaactgggtgccgtcccgccgcgagtacacgctgtacatgcgtccgttcatgttcgcttccgagccgttcctcggcgtgcgcgccccgcaggaggtcgactactgcgtgatcgcctccccgtccggcccgtacttcccgggcggcgtcaagccggtgagcatctgggttgaagacaagtggttccgcaccggccctggcggcactggtttcgccaagtgcggcggcaactacgccgcctccctgctcggcgagtacaagggtgttgagaatggctgcgagcaggtgtgcttcgtggacgccgccaccaagacctacctcgaagagctcggtggcatgaacatgatggccgtgcacaaggatggccacgtggagaccccgtccctgaccggtaacattctgccgggtgtgacccgtcgctccctgattcagctgctgcaggacaagggccacgacgtagtcgagaccatgattgccctcgaccagctgctcgaggacatcaagtccggtgaggtcaccgaggtgttcgcttgcggcaccgcagccatcatcaccccgatcggtcgcttcaagtccgagaagttcgatgtcaccgtcgccgacggcggctccggcaagctcacctgcgaactgcgcgacgagctgctcggcatccagctcggcgaagtcgaggacccgcacaactggatgtggaaagtgtgctgaactagcaccttttgtttctgactaagaccccttggaacagcaacaattccaaggggtcttggcgtattggaaatgttcttggctagagagatacagatggatttagcaacattccgcaacaaataatatgatctaggtcttctgcacgttgcggggggtggttatggttcatccagatgagaacaggagcaaacctatgagcaagatgagtgacatgacggaataccatgcttcagcctaccgtttgccgtcaggcttcgaacactgctcgaaattgaagccggtggctgaggcagcgacggcgctggaccgggtcaaggccgtggtggatgtgctgtattcgccgggcggctgcccgtgggacggcaagcagacgaacaagtcgctgctcaagaatctgctcgaggaaacctacgaatacgtcgacgcggtggagactcacgaccgtgacaacatgcgcgaggaactgggtgatgtgttgctgcaatccgtgtttcaggcgcgggtctgcgaatcggatactgaggacccgttcggtattgatgaggtcgccgatcggttggtgaacaagctcatcactcggcatccgcatgtgtttgcggctgatgatgccggcaattcctctgattcttctgatgcttttgatgctgacagtaacgacgggggagaagctgcccaacccgaatccccggaagctgtgctggctctatgggaaaagatgaaacagcaggaaaagcatcgtaaatccgtgcttgagggcatttcccgcgctcaaggtgcgttgcctcgcgcggccaaagtcgtttctcgcatctccaaatcgccgaatgctgatagattgttcgcggcgtttgatgagtcggctgcggctgatgctcagcgagatgatgtacatcctcaagcggcgaaccaatccgaatcaagcggcgacaattccgctgaacgggagaaggccgatgcctacgccgatgaaatcctcgccgtcgtgcgcaaggcccgcgttgacggcatcgatatcgagtccgcactgcgcaatcgcttgcgtgatgtcgaagaaaaagtcgccttgattgaatcagaaatcaacaacgattaagtccatacatgttttttgatcacggatcgtaaaacttagaggtgctgagttgccaacgactaccggcaagctggcgtcattgccatcctattcacgtcttagtggccccttcctccccggccatactactcaggcaaggcctgttgtaggctcgggtacgacgggctgtagcgccgaataaggatgaacgggaacagaacgaagacggactgagacgaaccgaagcggtaccagaggggagtggctcatgcaggtggcgttggagaacaacatcgtttttgtggtcatcgagtatttagcaatcctgtgttggggattatcgggcggacttgccgccattcgcaagggctacgacatcttcaccatcatgctgtgcggatggcttaccgcactcggcggcggtcttgtgcgcgacgtgatgctcggtgccctgccgccggtcggcatcaccgacaaaggctatgtgctcaccacgctgttttccggcattatcgtggtggtggcccatccggagatcaccaaactcaaatggacgatgactgtcatcgatgctctgggcctcggactattcgcagtcagcggcaccgcaaaagctctggcctacggttcctcaggcatgacagccgtattccttggcatgttcacagcactggccggcggcctcattcgtgacatcttcattggcgacgtgccaatgattattcgagacaaacacctctatgctgtgccttcgttcatcggctgcatcctgaccgtgctggtatggcgcggcgtaagctacggctggttcgacatgcgctcggaaatgctgctcgacgtgctgatcgtcatcatcgtggtggcgctgcgactgctctcggtaggcttcaacgtcactctgcccggagccgtcgaacgtcatcgcgtctacctgcccagcgaaagccgatatctcaagcgcccggtcatccatccgcacgccgataccgtcgatcccggcgataccaccaaggacgaagaagacaagcctcaggatggttcaaggccgcctcagggctaactgtcttcaaagaggtacatctggccttctgcagaatgctaactgctttcaaagaggtacctgaagcacgaaacgctgagtataagtgttgcaatgatggcgtttatagttggtttttcccgtattcggtacctctctgaacggagatgtcatttcgcaagaccgccaatgtacctctttgaacggagatacaaaaagtcccgcaagccagatgacttgcgggactttctaaaaccttaagaggcttatgctcacagagcgttgatcgcaacagcgaggccggacttgcggttggcggcctggttcttgtggatcacgccagcgccagcagccttgtcgagcttctgggcggcaaccttgtaggcggcctcggcggcagccttgtcaccggcggcgatggcttcgcgggtggcgcggatggcggtcttcaggccggacttcacagccacgttgcgaaggtgcgccttctcattggtgagcacgcgcttcttctgcgacttaatgtttgccacgtttactccaaacgatgtgtgttataaggacatacaaaagttagaggatagcatgagccccggaaaaacccgcgcaatgccacgccgaatacagtccctcggctacactaggtgaagtttgagtatatgccaagaggaggaatgcgttggtcgtccaacacaatcagccgggttccacggatcagtcggtgattcgcaacttctgtatcatcgcacacatcgaccacggcaagtcgaccgtggccgaccgcatcttgcagttgagcggcattgtgcccgagcgagagatgcgcgatcgcttcctcgaccgtatggatatcgagcaggagcgtggcatcaccatcaaatcccaggccgtgcgcgtgccgtggacctttgacggcaccgaatacacgctcggtatgatcgacacccccggccacgtggacttcacctatgaggtgtcccgcgcactggccgcctgcgaaggcgcggtgctgctcgtcgacgccacccagggcatcgaggcgcagaccctgtccaatctgtatatggccatcgaccatgatctggccatcatccccgtgctcaacaaaatcgacctgccgtccgcagaaccggacaagcatgccgaggagatcgcaggtctgatcggctgcgagccgagcgacgtactgcgcgtctccggcaaaaccggcgaaggcgtggccgacctgctcgaccagatcgtcatggacgtgcccgccccgcacggcgaccccgaggcccccgcccgcgcgctgatcttcgattccgtctacgactcctaccgcggcatcgtcacctacatccgtatggaggacggcgaactgcatgaccgcgaaaaggtccacatgatgggcattggcatgacccacgatcccattgaaatcggcgtgatcagccccgatatgacccgcaccaaggcgctcggtgccggcgaggtcggctacatcatcaccggtgcgaaagatgtgagtcagtccaaggtgggcgacaccctgacttcggccgtccgcccggctgccgagccgttgcctggctatcgcgacccgaagccgatggtctacgccggtttgttcccgatcgacaacgcccagttccccgaactgcgtgatgcactcgacaagctcaagctcaacgacgccgccctgatctacacgccggaaacctccgtggccctaggcttcggcttccgctgcggcttcctgggtctgctgcacatggaaatcgtcaacgagcgactctcccgcgagttcggcctcgacctgatccagaccgccccgaacgtcacctacgacgtgaccgccgaggacggcagccagcatcatgtgaccaacccgagcgaattcccggacggcaagatcaagaagattgtcgagccgatggttgccgccgacatcatcacgcccaaggaattcatcggtgcggtgatggatctgtgccaggaccaccgtggcattatgggcacgatggagtacatctccaccgatcgtgtcgagatgcactaccgcattccgctggcggaaatcgtgttcgacttcttcgaccagctcaagtcccgcaccaagggctacgcttccctcgattaccatgaggatggcgagcagcccgccgatttggtcaaggtggacatccttattcagggcgagaaggtcgatgcgttcagtgccatcgttcaccgcgataaggcgtattcgtacggtgtgatgatgaccaagaaattgcgtagtctgattccgcgtcagcagtttgagattccgattcaggctgcgattggttcgcgcatcatcgcacgtgagaacattcgtgcgttacgcaaggacgtgctcgccaagtgctacggcggcgacatcacccgtaagcgcaagttgctcgaaaagcagaaggctggcaagaagcgcatgaagatgctcggccatgtggaggtgccgcaggaggcgttcatcgcagccctgtccaccggcgaggactccaacgaccgcgacaccaaagacaagattcgtgccgctcagaagaccgagggctagtgttcgaggtctacatccacgtcccgttctgcttgcggcgctgcggttactgcgacttcaacacctacacggctacggatcttggtgcgggggcctcgcgcggcaactatgccaatatggtcattcgggaaatgaaattgaccaagcagtggcagctcgatcacggcatcgcggagccgccggtctccaccgtgttcttcggcggcggcacccccacaattctcgccgcccgcgatctggtcgccatgctcgatgccgtccgcaagatctggggcatcgcgcccgacgcggaaatcactaccgaagccaatccggacacggtcaacgagtattacatcaatgagctcgctgccggcggcttcacccgtgtttccttcggtatgcagtccgccgtaccacatgtgctcaaaaccctcgaccgcacgcatacgccggccaacgtggccgcaggcgttaatgccgccaataaggccggcctgcgctccagcgtggatctgatttacggtgcaccgggggagagcctggacgattggcgcacctcggtcacgaccgccatcgatcttggcgtaaaccacatctccgcctacgcattgaccgtggaacccaccacgaaaatgggccgtcaaatcgcggccggcactctgcccaagcccaatgacgatgacgaggcagctaaatacgagatcgctgacgacctgttcgccgccgccggcctcgaatggtatgaggtctccaactgggctcgccccggatacgaaagccagcacaacctcggctactggcgcaacgtcgattgggccggtctagggccaggtgcccactcccactacaacgcggtgaccgaggctgaccacccccagtcagcttcgctgacagcccccgctggcgggggcaagtccgaagccattgcctctgcctcagctgatggacaggccaacgccgaactaggtatgatcaacgcgcatgggaacaactcccaagaaattcatgcccccgctggcgggggttgtccggcggatgccggactgggggtggtttctgtctcacacggtctgcgcagctgggacatcgcgcacccgcgtttgtggggcacggccatcaacgagaaccgtgtgccgtgggccgatagcgagacgatcactcccgaggaaaacctcgaagagctcatcatgctcgggctgcgcctgcacgagggccttgacctcgaccgcatcaaccgcgccatcaacgatgcgggtatgagcagcacgccccagactctccgtaatgtttcccttgaccaactcgccccaatggtcagcgaaggcctgattaccgtatccgataatcatcgagtggtgcccactcgtcgtggccggttgctcaatgactcggtaatcgaacagttcttcgatttcgtcggtgtatgagtcggtggtatggtgcgcggcagtcgccattacctgttcgctagttgtggttacaccgtcagagggagctatttttgttttaccggcgggggagggaaccgcgtaggactacgtccggggcgctttgcacgtagatcaggcggttggcagtgccgccggtggcctccccgtcatcgcggttggacaggatgctgtccacggcggcctggcccatttcggccagcggcagatgcacggtggtcagtggcggaaacacgtcggcggagtaggggatgtcaccgaaaccggtgacgccgatttcccgacccggctcgatgccgttggcgcgcaacgcggtcatcgcaccgatggccatcacgtcgttgagcgcgatgattgaatcgatgcctttgccgtcgtacagtgcgccttcgcccggcttcagcagtccggatcgggccatttgcatgacggccgcatagccgtcggtacggctgaacttaccattcgccacggctttcggatccacggtgatgcctgcctcgcccaacacttccatcacgccggccagtcgttctttggaggagcgatgtgcgtcatcgcccttgagaatcgcagggcgcgtatacccggaatcgacgatcagctttgcgatggcgcgcgcgccgacatcgttcgccacgtccacggccgggaagggcaggttgcggttgagcacgaacacggcacgtccgccggatgcttcgtactgggtgagttccgtctgcaacgcctggcgttccggcgcgtcggtgtattcactttcggagatgatgatgccgcgcggcctggtggatacggacttacgcaccgcctccaactcttcgtgcggggtggctgccacgccgatggtcacggaaatgccgcgttcggccgccgccttgaccacgccttgcgatacggatgcgaagtagggatcggagatatcggagaccagcagcacgatgttcggtgcggtgcctttggccactgcctgagcataggcgttgggacgatagttgagcttggtggctgcttccatcaccttgacatacgattggttgcgtaccttgcgggtgctgccgttgagcacgcgggatgcggtggcgatggagacttgggcttctttggcgacatccatcaatgtcgctggcgattgcgccttatcgttctgtacagccacgatcgaatcgatccttttcttccctgaaacggaaaacgtgtctaaacgtttaccgaaacgatatcgcatttttgcttgcaatagtagcattgtggattggaaagcctgaattctgaacaaaaaaataatcaagcgaattacggaaaacgtttaccgtttcgtcgtgtcgtgcggtatgctcgaagcatgacgcgatacttatgcgcccctgactccttcaaagagagcctgaccgccatggaggcggcccgggcgatggctcaggggattgagaatgccgaccacgatgccgaggtccgttgccttcccatggccgacggcggtgaaggcaccgcacgcgcgcttgtcgacgccaccggcggatcgatgcgcgccgtgccggtccacgacccgctcggccggcctgtcgaaggccacttcggtctgctcgccgacggcacgaccgccgtggtcgagacagccgaagccagcggactggcactgcttgaagccaaagaacgcaacccgttgatcgcctcctcctacggcaccggcgaactcatgctcgccgccgtccgttccggagccaagcgcatcatcgtcgggctcggcggcagcgccaccaacgacgccggtgccggacttctgcaggccctcggcgttcgtcttctggacaagaacggtaacgacttggcacacgggggagcggccctcgccaatctgaccaccatcgatatcagcacgatggacccggctctcaagaacgtcgccatcaccgccgcctgcgacgtgaccaacccgctgaccggccccaccggcgccagcgccgtgttcggcccgcagaaaggtgcgtccaaagatgatgtcgccacattggacgccgccctcgcgcattttgcgcaggtaatcgacagccagctcggcgttgccgtgaacgacgtgccgggtgccggcgcggccggtggcatcggtgcagcgctgaagggcttcctaaacgccgaattccgcccgggcatcgccatcgtcatcgaacaatccggactcgatgcggccgcgcaatgggctgacgtggtgttcaccggcgaaggctccatcgacttccagaccaagttcggcaagacgccggccggcgtggccgaaaccgccaagcgccacggcaagccggtcatcgcagtagccgggcatattggcaccggcatcgatgagctgcatgaggtcggcatcgacgcggtattcggcatcgcgcccggagccgccagccttagtgagctgttggccgatgcggccgccaacgtgacccgcaccaccgaacaaatcgtacgaaccctacaactgtgagcaggctcccgctggcgggggctggcgggcttcgcccgactgggggggggcagcgctgagaaccaccctcagtctcgctatgcgagacagctcccgcagcgggagcgagtaccggaaaggaagacgtgcgcgccacactggaaaccgtgagctgcggcgaactgaccgccgtgtatcgcaaagatagcgacaccggcatcgtggaactggtatcatggatcgtcgacgcgagctcggtcttgtgacatgattggtggtgatggaatcaacgatgagtccaacaaaacggcaccgcctcccattgcgcaatatcgcgcgcaatattacgcagcgtattggctctccgaatgcgtgtctgctaaacctcgtgttgctctatcagcgagctttccgactgcgcagctcaggcaacatcacgacgaacaggatgaccgccacaatcgcggtcagcagatcggcgatggcctgcgcggcgattacaccctgatagccggccagccgggagccgacgaacagggtaatcgccagcatcacaccctgcctgctgatcgacagcacaaaggcgccgaccgccttgcctgcggactggaaggtgcaggtcgtgaccatcacgacggctacgcacaccaggctcagcagctgaacccgcagcatgccggcgcccagcgtgatgatggtggcgtcctcgatgaagaatcccatcagtagacggtcggacaggctgagcaccacggtcatcaccagggcgaacagggacaggaacaggtaggaaaaacgcagaatgccgcgcagtcgaggcatattgcgggcgccgtagttgtagccgatcagcggctgcgcgccgaacgcgaatcccacgaaaaccagcaccgcgatcatgatgactttcagcgcgatgcccatcgcggctaccgcgtcggtaccgtaggggagcaggaacaggttgatcatgacgatgccgacgctctgcgtgaggttcgtgatcgccgaggggatgccgatggcgaggatgctcccgacctcccgggccgtgaccgccagacgccggcgcgcgcggtcgatgacggtccgcgggtcgatggacaggttgctgctgtgacgcagcgtgaaccagacgaaataggcgtcggtgcagatgttggcgatcacggtggcaccggccgaacccgcagcaccccagccgaatccgtggatgaacaggggattgagcacgatgttgaccgccgtgccggccaccgaaccgatcatggactgcacggcgtggccttcggtgcgcagcaggttggacggcgtcatcgacacgatgatgaacggcgagccgacgatgatcagtgtgtagaagtcggaggcatactgccaagtgtcgtcagtggcgccgagcagcgcgagcatcgggtcgcggaacgccaggcccagcaccagaatcagcaggccggtggcgatggcggcatagaagcagaacgcgctgagtcgcttgccgtcggcgaaccggtgttggccgaacaagcgcgagatgaccgaactgccgccgaggccgaagatgtcgccgagggcgatcatcacggtgaacactggcgcggtgagggagacgcccgccaccatatcggtgtttcccgtatgcgcgatgaaataggtgtcgaccatgttgtacaccaaggtgaccagcatgctgagcaccacgggcatcgccagcgagaaatacgcctccggaatcggcgccttttcgaagagttcgttatccatttccgtcccttggtgtttcgttcttcagtcactgtgcaggatgccgttcggcgtgcatcacaggcattgtagaggcaacagtgtggacaacgggcgggggagtatctcatgatgcggtgagggcgttgatgatgacgcatcgtgtattggcggccgtgtgcatcgtatgtgaacctgtgctggcgcggcgtacgcacgatgggaaaagaaagaatatatggaccccgttgtcccggttattgttcagttttactgtgttgaattattgcgttattcaattattgtggtgtgccggccgattgcggcctgagggggattgccttcgtatgtgtcatgcaatctcatgaacgggattgttcgctagattcagcgagcgtccttgttggcggcgttgatgatgtcggcgaacatcttggagtcggcgtagccggcgcgggcgatggcatccataccggagagggcgagaccgcgaatcatggaatccttgagagacataatcattacctttcgtttgcgcatcgccgtgagcggctttgcgattgttgtttaagctttgttgttatggggtccgtggctaatctgattggattgccggaccggagccgatggctcagcgagcgttcttgttggctttgttgatcaggtcgacgagcgtgctgctgttggcgcgaccgcactggctcatggagctcaggccgtacacagccagaccgcgaatcatggaatccttgagagacatcatgtttcctttcgttggtcaaaaccttggggctttgagttttgtttatcggcttctttctgaaaccggtttcagaataacgcagtccgatgacaaacgcaaggggactattccgctctcggcgtttctggcggaatatcgccgttctttagataccattcggtagttaagaggttgtctagtcgaccttctgacggccttgttctgagcgtacggttttcacgaggtatggcctcatgtcgcggaaatcgtacgctgagtcgtcgtaagcgtacggttttcacgaaatggggcctatcttcaccggattttgggcacaccggccttgagcagcttggtctcaagattgatggggcgtagcagatcctcatagaacacatggacgatttcggtgacgccctgttcccggagatgccgatcacgtctgcggtcgtactccattttcgcctggaggcttgcgcgattcttgttgctgatgtcggcgtatttggccatgccgtcgtattctgccacgatgatgcggccgtctgcgagcttccaacagaaatcgacgcgatatgacattgcgggattgtcgggattcatgaactgcacctgcagcagggggatgccgaaagacaattcggtgatctggccacgcatcaatgattcgccgccgttttcgctcaggggatccgcgtacttcagcagcttggtcacggagacctcgtcgcagacgctttgaatcatcagcgactgcacctcttcgatggtcgtcagggactttctcagagccgaatcgtatatgggcagcgcctgtgggaatgggaataccgcgcagtcgagcagcgttcgcgccggagtcgtcaagagaatgccgttatgcttccgcgtcggaatccgattgatatagatgcggttgagacgcgcctcgtctccgccgccgatgccggacttcgaggcgatgtgcactgtgccgtcgtgcagggaatagttgtgctgcagtccgtatacgcacgccgcactcaaccccgcaaatacccactgagggtggattgcggacaacgcacgtatgacctgcaatgactgttgctctctggtcatggtgttccaaagtgttcggtcggcgtacaggttcttatacggtgacaccagctccccggcatgcaggcgacgtttcagggcgcgccgttgcgcatcactggtgccatagcagcagcgacgctcctgcttcgcctgctgcagcagtgcagaaacttccttgtgttctttcatatctcgacgctaagggtgattttgatcgttgcacaagctcaaccggcaaatgtggatactatgtcacgcgaattgttgctgtggataacttgaatcgacgtcgacggctttgccgacggtcttgtcggaggcgatattagcctaggacaccttgctgcgccgccttccataccgaaaacagtcatcagtgacaccgggggcatcttcagcgtacgttcttcacgaaatcagctgccatttcgtgaaaaccgtacgctcagaatgactcagtgtacgttcttcacgagatgaggccccatttcgtgaaaaccgtacgttgacgacgattcagtgtacgttcttcacgaaattagggatgatttcgcggaaaccgtacactcaccgcaactcagcgtacggttttcacgaagttatcgatttgggtataggttccccgtcatgaactacaatgaatcgcggcgaaaaacggagaaccgaagtcggagcgcggctgaacggatatgggtgtgactggatggctgtcatagtgatgccggttctctaacatacgcaataacaacaactgacaacaacaggggagacaaggatggcgagaagtgcgggccgcacccggccggtgatcaaggacgtggccaaactggccggagtctcggcaccgaccgtctcccggtatctcaacggcaccgtcaacgtcaccgaagacaagcgtgaacgcatcgccaaggccatcaaggagctgggctacgagccgagcattgtggcgcgcgctctgtcgaaccgggagatggactccgtggtggtgttcgcggccaatccttccgccttctccacgtccgaaacgaaccatggggtggaggccgccgcccgtaaacgtcggttcctgctcaatattgtttctttggacgagtccgacatggactccgtcaaggctcgcgtgcgcatgggtttgtcgatcaggccggcgggcgtgatcgtctacgagtacgaccgggccggcatcgccgcactggaatacattcccaaagatatgccgatggtcgtggtgggtggcagcttcggcgacggcgaataccaggtcatcaacgccgaaagggatggcggccgttggatgaccatgcatctgctggatctcggccatcgcaccgtgttccatgtggggcgtccggaaggtccgaccgataacacccgcaccaatgggtggcgtgacgcgctcaaggagcgcggcgtcacggcacctgacccaatcatcgttcccgacgatgatttggaggagtcggtcaaggctgggcacaccttgggccgtcgtggtgatgtgactgcggttttcgccggcaacgacgagaccgccatcgctgtgatccggggtctaagggaggttggtcgccgcgtgcctgctgacgtgagcgtcgtaggctttgacgaccgcaacttcggtgccatgtggaatccggcgctgaccagttacacccagaacttcctggacatgggggagcgatccttccgaatgctgttcgaacagatccaggccaagcgcgccggcgatgacgcgccgccctcgcaggtcgaggtggtgcaaggcaagccgtgtctgcgagcctccgaacgcgcgtacggcgacggtgaaatcgcgtagtcgatggggcgtgcgtatcaatcgatagtgactgtagcgcatccatatcgtggtgaggagtctctcatgccgaactgtaagcgcttaccttaagtagtttgtaatatggtttacgtcatactaatagatattctaaatcatagtgttttgcaagggcttttgcggaaaatggctatttatcaacagttttcgaaaagtccgcatgacgggcgactgtgagcacgctttatggtaaccgctttctgtagcattatcgttagagtatgacttttgaacaatcggcaactctgaagactcagccccagacctcgggcactatctcagcggcagacgccgtgatgcaatcggcccgcgacgaacgcatccccggcaaactcatctgtacgatcatggccgtggtcattgttatcgtgttcgtcgccatgctccacgccctacgtaaccggaagtaggttgtaggcgggattggtctgactggtatccgccacagccgggttcggtagagcggctaccaatcggccagtgtctctatggcatcgaatcctgttctgcgatgttgttcgtcaaggttgttccagtaaggtgattcatcggtgagcatgtcgtacgggagcttgatacgtctgcgatccgtgtggctatgtagtcgccgagtttcggcatcagggtcggtgatgagggatgcgagcattgcggcatcgtacagatgtctatctccatatccggcatggtctgcttggtatgcggcgctcttaagaatcaacgcgccaagcagatccgcgtcggtagcgggacgcacgtcgagaccgcccatgatggcgtgcaactgcaccatgagaccgccggtgagcagtcatgattcggcaatgcgctcggccaccatgtatacgatattccacggatgagcgccgctggggattgcaatgcgggaaatcattgctcatttccttgttgtatgccgtgatgagttctgtaagggtttcgagcccctgcgcgtcgttctctcgggtcgttggattcggccagatcagcggcgcatacgccgatgggcatgggcccctgcccggcgggcagaaaatcagcgagatgccgtgattcggcgggagacctcgtgatggccccagcccttctgttcggtagtggtaccgctacaccgactctccccgacactccagtgccgccgatatcagtgaatgcccagcctgatgtcggtagagtaaagactattggcttggtttcgacggcgagacttctccaatggccaatatgcactgttgcaaaggagtatgcggtatgcaaccaatcaaagccattcaatacggctgcggcaaaatggcgaagtacacgattcgctatatgcacgagaaaggcattcaaatcgtcggtgccatcgacgtgaacccggaagtcgtgggcatggatgccggtgtgtttgcaggcatcggccccatcaatgtgccgattcgcgccgatgccgaggctgtactcaacgagtgcgacgcggatatcgcggtagtcacgctattcagcttcgagaacgaaatcgccaccatgtgcgagcagtgcttggcccgtggcatcagcgtgatcaccacctgcgaggaatgcatctacccgtggaccaccgatccggccaccacgaaccgtctcgacatcatcgccaaggaagccggtgccaccatggtcggctccggcatgcaggacatctactgggtgaacatggtctccaccgtcgccgccggatgccacagcatcaagaagatcaccggtgcggtgagctacaacgtcgaggaatacggcctggctttggccaaagcgcacggttgcggtctgaccgccgaggagttcgaggccgagcttgcgcatcccgaaaccgtggtgccctcgtatgtatggaattccaatgaagcgctggcccagaagcttgggcttaccatcgcatcgcagacccaggccagtgtgccgtatttcagcgatgtcgacgtgtattccgaaacgatgggcgagatgattccggtcggcaaatgcatcggcatgtccgccgtggtaaccaccgaaactaatcagggcatcacgttggaaactgcctgtatcggcaaggtgtacgggccggatgatggcgatatgtgcgattggaagatcgagggtgaaccggacgtggagttccacgtggtcaagccggcgaccgtcgaacatacgtgcgccacaatcgtcaaccgcattccggacgtgctcaacgcgccagccggatatgtgacggtcgatcagctcgatgagatttcgtatcttacgtatcccgccgcgctgtacgtggcatagccttcatattttcaaggatgaaggccggcactcataagggtgccggccggtatcaggcggccagagtcgacgtgcgtggcatcacctggaactggatatggtcatgggtgatgtcatcgggccgttcatgccgtaggttcgactcgttcagcgtcaccatgcgatcgataaccgtacgagccattgcggggacgtccatcgccacagtgctgatgggtgggttggtgcaggcggagaaggggataccgtcgaatcccatgagccgtacgtcgtcgggcacgtggatgccatgttcggtgagttcgcggagcgcgccgatcgctatggtgtcagacatgcacagttctcatgctcccgctggcgggagctgtcatgcgaagcatgactgagggtggtccacagccgccaatccgtaacatcacccaacgcagcatttcacgatacggacgtttccgtatcgtattttcgtgtggtcaaatagacatttcgagcgaaaaagttcgaaatacccccataactggccataaaaaaaattgcttgagaatcactattgacttttatggcgactcggtatatggacacatgaaacgtaaatgacatggagcaacggtactgtgtcaacagcaatgaacgaagaggcatgtttttcttacgtgcccacaaccaattgaggtgatttcggtgacattcaaagccccgctcgatctcacggtccacgctccggacggtatgtatgatcccgccaacgagcatgacgcctgtggtgtgggtatggtcaccactttgaacaagcgtcctgagcgcaagatcgtcaccgacgccattgaggtgctggtcaaccttgatcaccgtggtgccgtgggtgccgaggagaacacaggtgacggcgccggcattctgatgagcatgccggatgagttcatgcgtgccaccgtgcccgccgaactgccggaagccggtcactatgcggcaggcatcgccttccttgaccgcgacatcgaaacctccggtcagcaggaacaggccattgccaagatcgtgcgcgaggagggactcgaagtcctcgcatggcgcgtggtgcccaccaacccggacggccttggcctgcaggcccttgccgccatgccaggattcaagactctcgtggtcgcctctccggacggtgctctggccggcgtggacttggatcgcaagaccttccgcatccgcaagcgcgtcgagcatgaggtgggcgtctacttcgcatccctgtccgcccgtaccatcacgtacaagggcatgctcaccaccatgcagctcacccacttcttcgaggatctgaacgacgagcgcatgaaggccaccatcgccatcgtccactcccgcttctccaccaacaccttcccgagctggccgctggcccagccgttccgtctgctggcccacaatggcgagatcaacaccattcagggcaaccgcaactggctctccgcccgtgaaggtcgtctgagcagcgaactgctcggcgagttcgagccgctgctgcccatcaccactccgggctactccgattctggcaccttcgacgagtgcctcgaactactgcacctcgccggccgctccctgccgcacgccatctgcatgatgctgccgccggcttgggagaagaacccggatctcgatccggacgtgcgcgccttctacgagtacaacaacacgcttatcgagccgtgggatggcccggccgacatcgtcttcaccgacggcacccaggtcggcgccctgctcgaccgcaacggcttccgtcccggccgctggcagctcaccgatgacggctacatcgttctggcctccgaggccggcgttctgccggagatcgcgcaggaacacatcgtgtccaagggtcgtcttgagcccggcgagatgttcttggtcgacaccgccgaaggccgcatcattcccgatgaagaggtcaagaggaacctcgctgcccagcacccgtaccgcaagtgggtggaaggcaactccgttgaaatgagcgacctgccccgccgcgagcacgtcagccactccggccagtccgtccagcgccgtcagcgcgccttcggctacaccgaagaggatctgaagctcctgctcacgccgatggccaacaccggcaaggaaccgctcggttccatgggtaacgatgcgcctatgcctgcgctttccagccgcagccgcatgctgttcgactacttcacccagaagttcgcgcaggtcaccaacccgccgctggactgggagcgtgaggagatcgtcacctcgctcgaatccgccatcggccccgagccgaacctgctggccgattccgagctgcacgccaagaagatcctcatcccgctgcccgtggtcaactctgatgagatggcccagctcaagcgccttgacaaggcccgcatcctcggcggctactaccgcccgtacgtggtcaagggcctctaccaggtcgccggcggcggcaaggccctcgaagagcgacttgacgagatcttcgccgaaatcgacgaggccatcgccaacggcaagaacttcatcgtgctctccgaccgtgagtccaaccatacgtggggtccgatcccgtccctgctgctgacttccgccgtgcagcaccacctgctgcgccgccacacccgtacacagatttccatggccgtcgaggccggtgacgtgcgcgagattcaccatgtcgcgctcctcatcgcctatggcgccgcctgcgtgaacccgtacttggcattcgaatccgtggaagatctggcccgtaacggctacctcaaggtcgacgcggacaccgctgtgaagaacctcaccaaggccctctccaccggcgtgctcaagatcatgtccaagatgggcgtctccaccatcatgagctaccgtggcgcgcagctgttcgaggctgtgggcctgagccaagaagtcatcgacgaatacttcaccggcaccacctcccgtgtgggcggcgtgggccttgaagaaatcgccgaagaagtggccatccgccaccgcgtggcctacccgaaccagtggagcgcgtccccgcaccgcaacctgcgcaccggcggcgactacaagtggcgtcgcaccggcgaggaccacctcaacgatcccgaggccatcttcctgcttcagcagtccacccagcgtggcgactaccagatgttcaagaagtattcgcaccacatcaacgacacgtcgaaccgactcatgaccctgcgtggcctgatgaagttcaacaccaaccgcaagcccatcgacatcgccgaagtcgagccggcctccgagatcgtcaagcgcttctccaccggtgccatgagctacggctccatctcgcaggaagcacacgagacgctcgccatcgccatgaactcgattggcgcacgctccaactccggtgagggcggcgaatccgacgatcgtatcaacgacccgcagcgctacagccgcatcaagcagatcgcgtccgctcgcttcggcgtgacctccgattacctcgtgcacgccaccgacctgcagatcaagctcgcccagggcgccaagcccggtgagggtggccacctgcccggtgccaaggtcccgccgtggatcgccaaggtccgtcacgccaccccgggcgtggagcttatctccccgccgccgcaccacgacatctactccatcgaggatctgaagcagctgatcaacgatgcgaagatggccaacccgaaggcacgtatccacgtcaagctcgtttccgagttcggcgtcggcaccatcgcggccggtgtggccaagtgccatgccgacgtggtgcttatctccggctatgacggcggtacgggtgcagccccgctcaacgccatcaagcacgccggcaccccgtgggagatcggcctgtccgaaacccagcagacgctgatcctgaacggcctgcgctcccgcatcgtcgtacagtgcgacggcgagctcaagaccggtcgtgacgtggtcatcgccgccctgcttggtgccgaggaattcggcttcgctactgcggccctgatcgtggaaggctgcgtcatgatgcgcgcctgccagaagaacacctgcccgcagggcattgccacccaggatcctgagctgcgcgcccgctttaagggcaagcccgagtacgtggtcaacttcttcatgttcatcgctgaggaggtgcgcgagatcctcgcccagctcggcttcaggactcttgaggaggccatcggccacgttgagtgtttggatcaggacgaggccatcaagcgctggaagtccggcggcatcgacctgaccaacgtgctcaagcaggccggcccggtacccggcacgatcctgcaccagaccatcgagcagaaccacgagctggagaaggcgctggacaacaagctcatcgaacttgcccagccggccctcgaacacaaggaacccgtgcgcatcgaaatgccgattcgcaacgtcaaccgtacggtcggcaccatggtcggctacgagatcacccgccgttacggcgaggaaggtctgccggacgacaccatcgacatgaccctgcacggttccggaggccagtccatcggtgcgttcatcccgcgcggcgagaccatgcgcatctacggtgaagtcaacgactacgccggcaagggcctgtccggcggtcgcatgatcgtgcgcccggaagacaccgtcaccttcgacaagcacagcaacgtcatcgccggcaatgtcaccggtttcggcgccacttccggccagatgttcgtagccggtcgcgccggcgaacgtttcggcgttcgtaacggcggtgccacgttcgtggtcgaaggcgtgggcgaccacggctgcgagtacatgaccggcggcactgttgtggtgctcggccccaccggacgcaacttcggtgcaggcttctccggcggtaacacttatgtgcttgaccttgatatgaagaaggtcaacccgggtgccatcaagtccggtgcactgctcttcaagtcgcttgatgccgaaacctccaagctggtgtacgcactggtcaagcagcatgccgaagagaccggttcccagttcgccgcggccctgctggaggactggaacgaaaccgtcaagcggttcacgcacgtagtgccgaagcagttcgtggccatgacgaaggccatggaagaagccaaggccaacaatgtagatttcaatgcgcccggcgcctgggaaaaggtgtacgagcaggttatggaaggagcgcgctgacatgggcgacccgagaggattcctgaaggtccgtacccgccgagagttggctgaacgccccgttgaggagcgtatcaaggactggttcgacgttcacgccgaaaccggcctgcaaccgtggacccaaacgcaggcggcccgctgcatggattgtggcaccccgttctgcatgaccggatgcccgctgggtaacctgattcccgagtggaacgacttggtccgtcagggcaagtgggaagacgcctacaaccgtctgtccatgaccaacaacttccccgaagtcaccggccgcatctgcccggccctgtgcgagcaggcctgcgtgctcggcatccaccagccgccgaccatgatcaagcttgacgagcagaccatcatcgaccaggcatgggatttggactacgtcaagccgctgccgccgcagcgtctgaccgaccagacggtcgccgtcgtcggctctggccctgccggccttgccgccgcacagcagctcacccgcgccggccacaccgtcgtcgtctacgagaaggacgacgccatcggtggtctgatgcgttacggcatcccgaacttcaagcttgagaagggtctgcttgaccgccgtgtcaagcagatggaggccgaaggcacccgcttccgcaccaacgtggaaatcggcaaggacatcacgtgggatgacctgcgtgaccgttacgacgccatcgtagtggccatcggctcccgcgtgccgcgcgatatgaagattccgggccgcgagctcgacggcatccacttcgccctcgacttcctgcccgacgccacgcgccgtatcttcggcgtcaagccggtgcacgacatcaccgccaaggacaagcacgtcatcgtcatcggcggtggcgacaccggttccgactgcctcggcacctcgatccgtcagggtgcgaaggacgtcaccgtgctacagatcatgccgaaagagccgtcaagccgtccggacaacagcccgtggccgaccttcgcccgcacctaccagaagacctcctccatggaagagggcggcgagtatatctactccaccgactccgtgaacttcgagggcaccgaagaggagaaggccaaggtcaccattgataactcgaccaccgccgaaggcttcgtggccgatgagcgtggtcatgtcaccggcttgaaggtcgtctccgtggctcccggcgaaaatggtccgttcactcgccagcctggcaccgagcgcgtgctgcccgccgatctggtcctcatctccgtgggcttcctgcatccggacaccgagaccatcctcgaccagctgcccgtcgaactcgacaagcgtggcaacatcgctcgcaatgacaagttcgccacctcccaggatggcgtgttcgtgtgcggcgatgccggccgtggccagagcctcgtggtctgggccatcgccgaaggccgctcctgcgccgcagccgtggacgagtacctctccaaggaaaagagcgagctgccggccccgatcaaggccagccagcgtccgatgatgctgcctcgctgaatactttccaaacagaaacatgaaaatcccttcttcgtgaggggatttttgcgtttctgggattaattactgccttgagccttcagtaatgtttatatttcgagaatattgcatacgtggttaacatgaagctcctatggtgtctttcgtcgccaaaaagatgacgccagaatatttgggagagattcatgaacacacgccatgtcacttcactggtcgcggccggtgcggcaatcgtcatgctgctcagcggctgcggatcgaccggtacctccaattccagcaatgcttcagattccaatatcatttccgtgtacggcagtgagccggcacacccactattccccggcaacaccactgaggccggtggcggcaaggttgtagaccagctgttcgcaggtctggtgacctacgatgcgaagggcggcatccacaacgaggtagcagacagcatcacctccagcgacaacgccacgcattacgtcatcaagctcaagagcggatggaagttcaccgacggcactccggtgaccgcgcactccttcgtaaacgcatggaattacaccgccaacagtgccaacaagcaggccagcgccagcttcttcagcacaatcgaaggctatgatgatctgcaaaagccggacgtggaccccaaggccacgctgagcggcctgaccgtcgttgacgacaacaccatcgatgtcaagctcagccagcccgactcggcattcccggtcaaggccggcagccacgcctacatgccgttgcccgaatccgcgttcaaggacccgaagaagttcggtcagcacccagtgagcaacggcccatacaagttcgtgtcctggcagcacaaccacagcatcgaaatggtgaagaaccctgactacaagggcaatcgtgtcgccaagaacgatggcctgaacttcaagatctatacctcgcctgattcggcatacgccgacctacgcggtggcaacctggacttcacgaacacgattcctgacaccgcacttacctccttccaatccgacaagtcgctgaaggcatacaacgagcccggtggcaatacgctcactttcaccattcctgaatggctggaacacttcggccagaacgaggaaggcaacctgcgtcgtcaggccatttccatgtccatcgaccgcaagaccgtcgccgagaagatcttccacggtaccgccacgcccgccgtcgacttccttgcagccccaatcagcgcctactccaaggaactcaagggaaatgaagtactgaagtacaacccgtccaaggccaaggaactgtgggccaaggccaacgccatctccccgtggagcggtgagttcggcattgcatacaatgctgatggcactgcgaagaactgggttgaggcaatctgcaactacatcaagaacacgctggatatcgatgccaagagcatcccgatgtccacttccgacgaattcctgtccaatgtggattcaggcaagatgacctccgcataccgtagcggttggggccctgattatccatccgcggacaactatctggtacagctgtacgattccagttcggccgacggcaagggcggcaacagcggcaactacaagaaccccgagttcgatgccatgatggacaaggctctttccgccccgtccaccgaggaagccgacaagtattatcagcaaggtgaggagattctgctgcaggaccttccggctatcccgttgtggaaccagaatgccaccgcagccagcacctccgcaatctccggcgtcgcattcgactacggcggcggcccagtgttcaccgcactgaccaagaagcagtaagcagtaagtaataaacagacagcgctagccccccgctggcgggggctgtcggcaaagccgactgggggtggtctcaaacagcagaccacccctaatcttgttatatgagcgagctcccgtaagcgggagcaatcgagaacatacaggagcacattaactatggaattcaccgtatccggcactaccgtgcgattcgatgaacgaacaatgcagttcgcttttacgcgcgacggtgccgaatggaatacctgcgctgatttcaagccgaccctgcaatgcgcgcaaggcaccttcgcgttcgcggatgccacttccatcacccatgagcagcgtgaaaccggcacgggaaccggcattcgcagcatcttcaccggctttgggcacagcgcatactcctttgaaacctatgtatgggtggagcgtgcctcaggcgatgtgctcttcgaatggattccgctcaatgagcaaggcctgaacatcaccaatgtgacgtggcccgcagccatggacttcgattgcgccgacgaccatgacacgacactcatcacccatgagcaaggtgtgatgatccccaacacatggcctaccgccgtgagcaccaaagatatcgccttcgacggccgcttcgaaacggctggcggttacatgccgtggttcgcgcagctccgcgcagacggacacgggtatatcgccatctgcgaaactccatggaatgccggttacggcatcgaccatcccagcaatggcccgtacacccatatcaatacttggtttgagccaagcctcggcacaatgaattatcgccgcgtggtacgctaccagttcctcgaccacgccgatcacacggcggtgtgcaaggcctatcgttcgtacgtcaatgaacgaggtcgcttgcgtacgctcgtcgaaaaggcggcgcgcaatccctccgtgcgtgacctgattggtcgttcatgggtgcacatcggcatcaaaaccaaagtacagcccgactcgtactactacgataaggaccaccccgagaaaaacgagtcactggtcaccttcgcacagcgcgaaaagcaaatgcgaacattgcacagcatgggtgcaggccgactgtacatgcacttggatggttgggcacagcccggatacgacaacgcacaccccgactatctgccggcctgtcaggaggcaggcggctgggaaggcatgaagtcgctggtcgacgcctgccatgagcaaggcgatattttcggcacgcatgaccagtaccgcgattactacttcaccgcgcaaacctttgatgccaacaatgcgattcggctggcagacggtacgatgcccgaacacgcacgctgggcgggcggccgccagacctacctgtgcgccgagctcgcaccggactacgtgcgccgcaatttcgccgaaatcgccgcacacggcatcaaactcgactgtgcatacttggatgtcttcacctgcaacgaaggcgacgaatgctcgaaccccgaacaccgcatgacccgccgcgaatgctttgaccgccgcgccgaatgcttcgaatatctgctctcgcacggcatcctctcctcgtccgaagaggtatcggactgggcagtgccaagcctgatattctgccattacgcgccatacgacttccagatgcgctcacccaacgagccgcgccaaggtgtgccggtgccgctgtataacctcgtctaccatgattgcgttatcgagccgtggatgatggagcgtgtggtggacggcgacgattacatgctgtacgccttgctcaacggcggagctccatacctgattcgcgatgccgcatacatcggcgttgacggcgacatggacgacgaacagcgcgctcgcacggaaaacgacatcgaacgctgccatacggtcgctgcattccatgagcgggtcggcatgcaggaactggttcgtcacgagttcgtggatgatgatccgctggtgcagcgttcggtattcgcggacggcactgcggtcacttgcgacttccatacgcaaacctatcgcatcaccgactgcccgcatcactgactgaaaatacaatgacacacagtgggttccgatggactggtggcaaattgccgccgataagcgagtaatatagccaacaatgtcaccgtcgaagcaggagtagtgaaatgccgaatcgtgcagaacgccgtgcccaagccaaagcaggccgcaggggagtgccgtcgcagtatgaccagacccgtggccgtggccgttcgggaatgattgacgaataccagctgcagcagaagtcccagcgtctgcaggacggcaccgacggcaccgaatggaagcccagcggcggtacgattgcggacaccgaaaccctgctgaccactaacccgaactacacgaatccgaagatgttcaaggcaccgcattcgctgcgtcagtggttccgcgtgggcagctggacgctgatcgccatcgcgattatcgcgttcttcgtggttatgtggctgccaagccatccgatgtggctgatcatcaccgtttccgcggtgttcattgtgggtgtgctgagcctgttctttacggctggcgattccaagcacaatccgaatttggatgagaacggcacggccgtctgatcttttgcctggtaaatccggcttgaaaagcaaaacgcacgacggaagttgtgcgttttcttgtatgcggtgccctaaagtaagaagtgcttgagtttctttctgacgcacgaaggagaggcagtccgatgaaagttgatattctaacccgcgaatacccgccgcacgtgtatggcggtgccggcgtacacgccgaggagctgtccaaggttttggccgagcgcattgacgtgaccgtgcgtgcgtttgatggcaagcgtactgaggctgatatccccgcgattcccaatgccgctaatgccaagggcagcctgaaggtcgtcggatacgatacgccgtccgagctcgctgatgccaacccggcattgaagaccttcggcgtggatctgcagattgccaacgatgtggatgccgacattattcatgcgcacacttggtatgcctgcctggctggttacctggccaagatgctgcacggtacgccgctggtcatcaccgcccactccctggagccgttccgcccatggaagcgtgagcagctcggcggcggctacaacctgagctcctgggccgagaaggacgcctacgagcacgccgaccgcgtgatcgccgtttccggtggcatgcgcaaggatattctgaccgcctatccgaatcttgatccagacaaggtggttgtggtttacaacggcatcaccatgtctgactttgctactccggcgccggacgatccgggctggaaggtgtttgagcgttacaacatcgaccgttccaagccgaccctgctgttcgtgggccgcatcacccgtcagaagggtttgccgtacctgctcaaggccctgcacctgatttccaaggatattcaggtggtgctgtgcgccggtgcgcccgacaccccggagattgccgaggaagtcaagaacgcgttcgccaagctggacgaggagcgtggcaacatcgtgtggatcgaggaaatgctgccgaagcctgagctgaacgctctggagcacggctgcgacgccttcatctgcccgagcatctacgagccgctgggcatcgtgaaccttgaggccatggcctgcggtctgccggtcgtcgcctccgccaccggtggcattccggaagttgtggtcgacggcgagaccggctatctggtgccgatcgaccagctgcacgacggcaccggcacccccaccgatccggacaagttcgtgcacgacatggccgccgccatcgacaagatcatggccgatccggagctcgccaagaagatgggccaggccggctacgaacgcgcccgcgacgtgttcagttgggagtccatcggcgacaagaccgtggaggtctaccagtcggtgctcgacgagcagaagaagtaaaagcgagacagcgcaggctcgcgcagcgtgacggagggagagaccgtgcaataagcggtgctctccctccgttttgtaccactgaggagaatcatgtcccaaaccgtcctccaacttgacaacgtcgaattccgccgcaaccgccgcgtcatcatcaccgacgtgaacctcaccatccatgcgggggagcgttgggtgctgttcggaccgaacggcatcggcaaatccaccgcagtcggcatgctggccacccgcaccttcccctcggaaggccgcgtgttcattctcggccaccagctcggcaaatacgacgtgttcaagctgcgcacccgcatcggtctcgcatcggccgacctgggtcgccagttccccgagttcgaggacccgctggatgccgtggtcaccggcctgtccgccgtgaccggacgttggcgcgatacttacacggacgaagaatacgcccgcgcccgccagctgctgcgtgattttcgcgtctcctatttggaaggcaaggagatgtggcgactgtccgaaggcgaacgcacccgcgtattgatcgcccgtgcgctgatgggagatcccgagctgctcatcatggatgaaccgaccaccggccttgacctgggcggccgcgagcaggtgatgcgcacgttgagccgaatcggcgaggaaagctctgaacgtgccgtggtgctggtcacccatcgcttggaggagattccggccggtttcgaccacatcgctatcatgggacgcaagccgattcccgctgaggacgccactgaagcgggcgtggattcaatgggtaatcccggtgctggcaccatcgtctataccggttcgctggaagacggtctaaccgacgagcgcctctccgacctgttcggcatgcccatcgaagtccagcacactcacggccgctgggccgcctacgccgtgtgatgccgttttggcctccgccagcggaagccgtcggccaagccgacttggggaggtgtcagcagtacttttcctttttcggcaggttttattttttctcttcgccccctctggagggggctgtcagcgtaagctgacttggggaggttcgacatatggcggaaagcgacatgactggtagcaaactcgtattcattgatatcgacggcacgctggctgatgagaatcatattgtgccggagtcggcaaaaacggcgtgtgcgcgggcccaagccaacggtcacaagctcttcatctgtaccggtcgttccgcgccgaaaatcgaacgcaacattctggatcttggattcgacggtgtagtttccgtagccggcgcacaggcgaatatcggcagcgaactgctgttccagcacctcgtatcgcccgaagccattgatgcggcgatggcctattttgccgaacaccatatcgagagctaccaatggcagggtgcggacggcatgtacatttccgaaggttatcgccgccatctggagtccaagggcaagacgtggaatcgtggtgagtttgcgcggttctggcatctgctggacgaggtagaggttccggctggatctacgctggggcacacgattcatgtgagtaagggatcgtatttcaccgggcccgagccggatgtttccttcgagaacactcagcatgatcttgccccctggttcgaactcgtgcacggctcatacgacaagatctcgccgaataacggcgaactgctcatcaacggcatcgacaaaggcaccgccgtacgcgacgtggcttccttgcttggctatgccatcgccgacaccatcgccatcggcgactccgataacgacaccgccatgctcaaagccgccggcacgtccgtggccatgggcaacgccattcatggcatccaagccttctgcgacttcaccaccaccgacattcacgaggacggcctggccaacgccttcaaaacgttgggactggtgtgaggctatgtcgtttgctctcagacggaggatcctttcgtgctgtagtagtgagaaataagttgaatatatactgaacggggaaggagggaacgatcttatgccgacgataatgaaagaacagatggaagccagcattcgtgtcactcctcagcaggcttttgatttcatcaagcagcaggtagacaccaatgaaggctttgatgaggatactcgaccagtgcgggtgcatgattcagcttatttgaagcaacttctggagagctgatgagctccgccgtatgtgtcattttcgattgcaatattcatatcgatgtggcagaacgtatgctgcgccgagcatagagaattgtgaattcaaaatggtttgttcatcatgcgaaaatagtggtcatctgtccgtcgcggttgcgcaatttacggtggcggaggagccggaacggaatctggagatcatcgacggattcgcgcgtgatgctgcggtgggcgatagggaagccgatctcattactgctgagctgagtcgtgagtgtcttgattccgcgcgtcgaacattgccggtgttgcagaatcgccgttttgccgatccgcagttgtgtgactgacctctgaataactttactagcgctgttgataagggttctatgatgggaatcatgaccactactgttgatagctctgattcaatgccggaacgtctgcaagaggggagcgtggcgcccgatttcactctgccggcggttatacctgggtttacagagagcggatcaatcaacctgtctgacgtgcttgatgccggccgcagggttgtactgtacttctacccggccgcgatgacgcccggttgcaccaccgaggcctgcgatttccgcgacaatctcgcccgattggcgtcgaagaatgtcacagtgctcggtgtctccaaggactcgcttgacaaactgcgcaagtttgcacagcgcgatcatctcacattcccgttgctgtctgatcccgacctgaccgtgcacaagctgtacggcgcatacggcgaaaagaagctctacggcaaggtgcacgtaggcgtgatccgctcgacgctcgtcatcaatcccgatggctccgtggcgattgcgcgctacaacgtgcgtgccaaaggacatgtcgattcgctgttaaaggcactggaaaagttggagaagctggagaagtagtgcgttctcgttgttcggacacagtggttcgtgcatagcagttccgtgcggtacgtgccgtatgaaccactgccgtatgaaccaccggttgacttctcggactcaccggcaaatagtgagaccgtgggcgcgcagtacgtctatggctggcatgtaatcgagcgatgttgcggtgggattgagcatcagttcgcggatggcggcggatgctgaggactcgcttgtcttcgaggattctgcggccgggaacagagcgtcggcgattagggagatgatacgggaacgtgcatcgccggcattggcattgttgctgctgttgccggcgtcggcagtggcggatttgccaataattgtggagctgtttcgtagaatcgtattcaacgctgcggcaagcggctcgggattgttctttgtcgcttcgacaatgtcatcgagctgatcgaataaggcgaacagccatgcacggcgttgcccctcatcgttgccagccgcaagcctttcattggtgacgcgcacgagttcatcaatcggtactgctggcgtctttgccggatcgcgatgctcgcggttgtcttcgatatctcccatcagatgctggattttgcactcgtcctgcaatacggtggtctcggcaaatgcggtggcgatggcgtccgcatcgatgaacttgccaccctcggactggaagcgcacgcgcttaggctcgctgtaataatgcgacatgccgaatgtgatgtactgcggcatctcgtcctgcaattgcttgaccgcatccgccactttgcgcatgtccgcaagctgctgatgcaccacaataaaggcaagcactgctttggcgtcggcgagagtgagcggctgaccgatgctggctccatgatggtgctcatgatgcgcgaacatgttcttcagcgaatcaaacaatcccataatgtcctccttcgaactggggcacaatcggctacatctgccgcttactgtagtcccgaatatgagggaatggttcgtggaacgccgagagcgaatattggttccgggcgatgctcgcagcaattgaaaatatcgcaggacatgacaaaaagcgggtgacaagcgttatcctgaaatacatagggcaaggaggccgtatgacagcagaagtggatgacggtttctttcaattgttgaacgcaggatttttgtgcgtggagaagcttattacgatgccggcaaggttgatccgccggtcatgattgctgagaatctttggcataccgtggttcgcgggaatgacgactatcaagtggacattcgtttgcgccatggcaaagtgatttctgccgcctgcacatgccaatattcccaacgtgcaatgtactgaagcatgtggctgcggtgcttatcttcatgcgtgagagccgacgtcgggaattagatgaatcgcaagaccaagtttcagagtttcctcatgaagcattgaattgtgtgagatggtatacgatgcatgaattcccgaaatatcgcggattgacagagggagattggcatgctgtcaagcgagtatttgaggtgttgtactgtatccccgaccttgatactacatatacacatgaggtaatggataccgtttggtgacatccatctcgtaggtaaacagttcgctgtggccaagacgctgggtctcagggatattctcgtccgcaccgagtcccactgcaatcacacgccaaccccgcacggcgagcatccgcgcagtcgccttgccaatgccaccggccgtccatcatccttgattggttccatgtgtactattatcgcgcggtggtggtgtcggaatcacggtatggtgatagcagccgcatggaacaagctacttgctaggcgaagcttgagcgttgtcatccgtcttgcgagcattcagatgccggtgctcgtattcctcgaagtcatcacggacggctgccgcgggatacttgctcttggtctttgcgagcttgcccatgacgatgtcatccatatccacaccaagcgcatcggccatcatgatgcaatacgtaagcacatccgctagttcttccctgacatgtccctcatccacggatggcgactgcggcgtccactggtagcattccagcaattccgacgcctcgatgctgatggacttcgccaggttctcaggagtgtggtattggccccagccacgctccgccacaaaatcacgaatcgactgaatggtactgtcactgatcatgactgacattctaggacttgctgaatgttggtcatgtaccagagctcatgatggaccataatatgactatgaacagtgagagcttggcgccgtttgtcatcaacctgccatatggccaatacagtagggaagcttttgaaaaggcttttgacgaatccctcgagaagcagatggggcgcagtgttaatgattccgagctggaacatttcatgctgcgatatgtgttggcatatccaacggtttatgtcgtgtattcaggaaagaccaatcgctattcgatgaagaacgaatatacggtgtacgtcggtgagaccaacgatatacggcatcgtacattccagcatcttgaaagagatgctaaagaacgcgaggactggaaagctgtagctgatgctgtctcgcggaatgatgatgcatatcggcaatatgttatttcacatcccaaattcaataagtcgttaaccctggatgtcgaaaaccgtcttatgcactatatgtccagtaccgattcggtgaaaaggctcaacaatcgacggaccaatgcgcaaggcgattattacaccgcagaccagtttgatcggattttctcgcaaatctggttgagattacacaaggaagattctgacctgttcccggcggaggagatcatccgagattccgcgttgttcaaggcatcgccttttcataaactcagcgatagccagctcgaagccgaagaatctattttggtgcaacttgccgccttggttgccgatagccggcaacagaagaaagccgatgagcaatctttagaccgccatccgaaattaatctttgttcaaggcgctgcaggtacaggcaaaacggtcctgttaagccacctgttctacagaatcgcggctgaaatcggcatccaaggcgacacctattccgaagacgaagattatcctgagctgccacgaacggcgaatggccggctttcctcatacattcttgtcaatcataaggaacaggtgcacgtatataatcagattgccacgaaactgggtttgcagaaggaatctggtgaagtggtcatgctgcccagtcagttcatcaatcgattcagcctacgcaacgagcatggtcgaggcattccagaccagccgcaaggcctggcggacatcgtgctcatcgacgaggcccatttgttgatgacacaaggaaatcaggggtattccgggaagaaccatctgtatgacattctgcgcagagcccgggtggtgattgcggtctttgatcacaatcagattatgcagtccagccagcagtgggacccagcggtgctggaaaaacttcagctggactctgattcgactcagaccgcatgcgcgaccgggaaaatcggcgcattcaaagcggttgatttgggcgccgaatatcatctgccgtccatttccgtggacgttgcgcatgtccatttgaaaaagcaattccgtattgccgcgagtaagtcgatgattcagtggattgaccgattcgcttcggggaaaggtatcggtcctttgcccgttgatacgggcgagtatgccgcagatggtgaagtgattcgagaaccttatgacgttaaggtgttcgactcgccggttgatttgtttaatgccattcacgcgaaggcccagctgaagcccgatggttgggatggggctggactgtcccgtttgttggccacctatgactggaagtattcggcgaaatctgagaatcagaatgatccgcatggcttttggaatgtggaactgcatcgcgatacttccggcgtatggcgtatgggacttgcggatgaccatggattcgatcattccgcaataagttctgaccaattctgcaagccttggaacaatcagctcgaagattccgctccgaagagcaggaaaggcatcgacaaagaactggcttgggcggagaagccgtacaccatagatgagattggctccatcttcaccatccaagggtttgatttgaactatgccggtgtgatcattggaccctcggcgacgtatcgtaacggggaaatcgtgttcgatgcaaaggccagccaaaactatctggcaaccaataagcgcaaagatttaggagattttgccgaagaaaacttgaagcatgagttgaatgtcctgctcaagcgcggcgtccacggtctgtaccttttcgcggtggacgaaggcctgcagcagcgtttgaaggagtgctgcatccattaaggtatgtgacggatattgtgctgaaaatgcactcaacatgccgggtgtcgtcgttcgctatgccaaaggcaagggattcctcatggacgagcatttggccaaggtccgggtttgcagccagctgaccaatatcatcaggaatctcagcgaagaacaggctggcatttctctgcatagtcaatggatatgtgccgaatgccgtaccgcgttgccaatgtcgtcactacaacgcaaacgccagctcctcccgcaacgcagtacgattcggataacgttcgacaatctcgtgtgccagcacacgggtctcctcatcgccgaacactgcggcgaaacgacgcagctgtttggcgatctgctggtatgtggcgcggcgtgccgtcaatgtattgtcgacgccacgttccaccgtaaaccggaacgcgggcgtgcccatggtgccgtatggcatcgcgtcgaggattatcgattttgccgattcggggtgttcgatggcgatggtgcgcagcaatggcagcggcgggtaatcgacggtgacgtaataggtcagggccgcgtccgaaagccgctcatccacgatgagcttctcataagcgggattgcgccaactgctgtgacgttgtgtaccgcctttggtggttatttccggctggtacttgatacggtcgatgatgttccgggcgcaatctctggccagcccatcagccacgtcatgccattcttctgcgctaagaccgccgtagatgcgtaacagattgcgtagtttactcacgtaatgggtatcggatctgtcgttgcaggaaagaatgtagtaccgatacacgttggcgagcaggccaacgtcattgagtccctcggcgcagcattccatgatggtatgccatccatggggcagcaggtccggcagcagaccgttatgccgggcatcgatatcgacatcttccatatcccggctcgacagaaggaaaccttgtgcgagcatgtatgcggaacgcaagcgcccttcatgaatcatgttcgcagcattcatcagcgtgagggccattgactccgggtagtctttcagaagctgctcgcgtccagcgtcatcgttggatagagcgtataggtcgtaggcgctcatgagtgtgaacaactgcaatacgtgtaacgattcatccgaaatgaagtcggtttcgtcgtctacttcgctcgtatcctcgttatcctcatcctcgtcgtcctcgtcgctttcttcgctttcttcgttgaacgagtattccagattacgcgttatcgcgttctcgatcacgtcataggcccatatgcgtttgtcgtcatattgggcgaaagcgagcgcgctggaaatcagcaacatactgttcaatggttcgcattgccgcatgtctttgtcgttcgcggcctgcgcaatggtgttcaatgccttgccggcggtagaggagtcggcgaattccgccacattctccatatagcatcgcacgcgcatcgccagatcatccataagcgtgagcaaaggttcggagccatcatcgttctcggacgagagcagaagcgcgtggacttcgtgtatgcacagtcgcaggttgccgcatgcgctcgcgtaatcactggattgcagggcattgcccgcgatagcccgcacggttttgatgaattctgtgtagtcacaggatttgctgtacgcatcgctgtgcttaccgatatgaataatgaaacgttcatggcatcggcggattgtgtcggagagcatggtttgtgcgtcgatcagcgggattagcggtcgttcttcgtctggctgggcgcagaaagtctttgcggcttcgcgcagttgggcggaccacaggaacagcagatggcctttgccttgctctgcgcgcgcgtcgaggtgttgctggatgggatccagcacggtgcgggggagtgcgatgacgccatcgtgagcgttggcggtgtcatcattgtggtgattgccgtgcgcgccaatgagctgtttgcgcagttcgtaaagcacggcacctatatgcttgcaatatggtgttctctgatacgggcaggtgcacgcggcggattgtatgcgaatcgaattgtcgtcggttgtggattcgtggtcggtgttactgctggtagtggcttggtcatcagtgtttgcttcattggcgttctcgccgtgagcgtctttgctgaggcggatgtcaacgtcataacagtcatcggcactgccggacacctgcgcgtgatacagctgcggcgcaatctcctgcaccgaactcactcggcctgattcccagtaatcggtggcgcgttcgagaatcaacggtgtgccttcgaacatgacctcgaattgagccagcgttggcttttgcggaacaactatactgctgattgtagcgggtggagtgttactcgccgcttggcggtgcatactggtctgatgtagtcttgtttccactgggtaatcgcattcggggaagaggcgtcaatggctgtactgacagatgctgaagctcgtcgtatgctggaactgctgaaggaagctttgtctccgaagtccatcaccctgaataaaggcgagaagcaattccaattgcatcagataagtttgtagtcaaatgaatcgtagtgtttacgacgagaagaaagtatgacgagttctgattttgactcattaattcgaagttacggaaaatggctgtctgataacacgacttatacgcaactggatgagtggtatgaagttaatgttccacttctggatgaagacaacgactatacgcagttctatgtgaagcccgggaagaacagcgtaacgttctctgatgactgtgccacattacgccgtttggagtcgcatgggatgactgtgacggaatcgcgtttggcagtgctcaaagatattctgaatcagtttggtattgaacgtaacggcgacgagcttactctgacgagcgatactgctgattttgctgatgccaagaatcggttcctgcaagctatcatcaaagttggtgatatgtctatgctggccaatcccatgtgcagacgtattttgcagatgacattcgtatgttctttaatgcgaacaacatacggtatgtggaaggcgctcagttccgtggcaagtctggtttgctgtgccagtatgactttgtgttgccgtttacgagtaaacaggcggaacgattctgcacatctattacgcggccttcccagcgactcatttccagtaccttatttcatgggaggatacgcaggcggcacgaaagacaccaagtgaactgggttgttttcctcaatgattcggatcggcgcattgacaatcagctaataaccgctttggaaaagtacaatgcgtatcccattaagtggagtgagcgggaatttaaggagaacttgtacaagcttgcttcgtgagtggtgtttgtggctttggtcgggagcgaggtttctgctgtttgccgtgtcgacctcccctcagtcgcctacggcgacagctcccctcggggaggggagttaaggaagcgcttaacgtgcgtggggcttcagccgctcccaatacgcccgaatcgcgccgaacgaatacaccgcgatcgcgacccaaatcaccatgaacgccgcatagccctgcgcgcgcatcggctcgtgcagcaggagcacagccacacagaactggatcagcgggttgagatattggatgaaactcacggtcaggtaatggctgtgctgcacgccgtaggagaacatggccagcggaatcgcggtggccaggacggagaacgccactaacagcgcgaccatggccgccaacgtggcgaccaaacgatacgcgagcacgctggtggcattcatactggacagtgcgcgccagtacagcggcagcacgccccagccgatattggacacgagcggcgcggctatccccattcgcgtctgctcgacggtacgaaccgaagtcacgtctcaccaccatagcgactgatcacatgagtgtcccgcacctggtcacatggcatattggacttgctgatgatgaacagtaccggttattgttagagtcttttccataggacacggagattgaacagatgattcggccttttctgagggcgcgaatcagattcgtaacgcagtggtttgtcccagactctgttacggtgataataacttcatcgttgataagggagtcttcatggcaggcaatggcaacacggcatttcgtttccgagtcactttgcgccttgacgggcgtgaatgctggcgggagattctggtgccggcatcattgacgttcttcgatttgcatgcggtattgcaggaatgctttatgtggtacggcgagcatctgttctgcttctgcgccacatttccgaatgggaagcaggtgcaagtggaagaattgtggggagaagagccctcataccatgaggcgaaatacgaacaatatatgccggtggagccgttgccggaagttcgcgttgcttcggaaaccgagctgggcgacgtgtttcccaaggtgcgtaccgctcgctattactacgattatggtgacgattggatccatgatattaagctgctgcgtacctaccgcagcgtgcacgttgcggatcctcagctttgggatggggctggggatgcgcctccggaggatgtcggcggggtgtatgggttcgagcggttccttgataccttgggcaatcccgaagatgaagaacatgatggcatggttgagtgggccgaggaccagatgtgggatcgtttcacgctgaaccgccatcgtgagcgtctgttccgttggcacaagcaccgtgacatgatgttgcatgggtgatgctgaacagatgatagccgaactgcattaggctactacgtcccacaccgtaatgtatgaccaatcattaggaggcccgtcatgactgctcatttcgacgagttcgaagaggagatgacctcccgcagcctggagcgagcatatgattacgtggacgagcataggatcggtgggttagaggaagtgtcggccggactattccacgccgaagtgcacggttctgaactctacgatgtcgatattcgacttcgtggcaacgatatcgtgttcgcatcctgcacctgcccctacgactatgacggatactgcaagcatattggtgcggtgctcttgacgttgcgtgattacaaacacggcggtaatcatcagcagaacgtgacatacgatgcgatgattgcaaagcaggacgactctcggccagacatacccgtagcagcaaatcctctcgcatcgaaacctgaagtgttcaatcgagtgctgcaacatattcgagaacgagtgggactgcgcaaatcagaacggtggacgcccgctcagcatttctatctggtttggaatcaggacgaaatcaatgccatcgtgactgcgaatccggcaatcgcgagcggcatggaaccattgatgcccgaaagcgccgtggatcgcgtcatggaatctcccatgcggcgacatctcggcaaggactacggctggaaattcgaatggggagatgccgccataaacggcgtgatggccgtattcgaggaagcagaacaatcgaacgactatccgctggccatgagacgcatgtgcgcggctttgcgaaaaacagtgtggttcgcgagacaagtcgatgatgaagagggtgcgctacagacatatatcgaacacctcaatgagcggatcctcgcttatacgtatgccgcggcaccaatcgttacaggcgagcaagcgcagcagatgctgattgcagcgttgagattcatacgtgatacccctatggtcgagatgctgttttggccgcacacgccgctggaatgcgtcatcccattcgcggatattcacgcacgaggtacggcggacgtagaacagatggagcatcagccccgcgagatcggcacgacctcgttcatgtgccgcacctatgcgcagtccacattgaatgttgcccagcaattccttcatgacaagaagggggattccattgacggccatcgaacgaacctgaccgattacgattggcgagctgcacaggactatctgatgaaactccatcatgactttctgctgtacggcggcgacgcaattagtgccgatgagctactgtccaaaaacacggacgtggccgaatgcagatttgccgtcatcgcacgtaaattcctggacggggattatgccggggccgccgctttcttggaacagacttacgattgggatgccgcgcaaaagcatgcggggtattgggagctcaccgctcaactgccgcatggcgagcttaccatgctggaggcctgctatgaacgactgaacgatgagaacggcatcaaacaattatatgagtactacgtcgctcacagtgattcagtggcggacgaacgttgcattcccatcctcaaatcgatggtcggcaaatcgggctggcctcaaagcgttcagaacatcctgcgcaactttcatgagcatgatttcggtgggaaagtccttgcacgactcatgactgaagagcgcctatccgatgaggccttggccttagccgggcagcggccggaactcctgcgtgatttgctcaagcccatcagcctcaatcacagcgcggaagcagaacgactgatcagaaagcaactgccgctggatcgcgatctgcaacagggaaatcgcaacgaataccgattcgttgccatgtggatcgagcaatatcgcaacgttttcggactcgaccaagccaaggctctcgccaaggagatcatggcaaagtacccgagacggtatgcactcaaagaggaaatcggccgcgtgctaaagtaacttactgataccaaaacattctaacactactccgacgatgccccgccaccgcggccacaagaatgcacgcaataccgaatacgcgcagcgcgccgcctttgacctgcgcattcgggcggaagaaaatacaccaccaaatcagatacagcgcatgaccccacatcagctgccgcgaacggctaaatctgccgagttcatcgagttcaccggccctattaagtccctcaactccatcaatcgccgtctgacccatcacatcacgctttcatacacattgccgattgacagtcctagaacacagtctagaactgtcatggtatgttcgcgcagataagggctccaacaaaattggctaaaagagaactcggcaacctataaaaagggcgcgcccgtgtgcccttacgttcagctccgctcacgaatgaaatcgaaaatcacgtcgaagacctgctggctccaaaaatcgtactcatgttcggcgccgtcgactagcaccagctgcgcgtccacgccgtgctcggccagccggtcgcgcatcttgacggattgatggtaggggaccacggtgtcggcggtgccgtgcaacaggagcatcggtggatactgctggtcatcccgcacctgcaggtagggactcatatcagccgcacgctgacggacctcggcattgatgccggtctcatgggtcgcacccaccacggccgcgaacgggccgaaataatacagccggaatggattggtctcatcgtcgaatgcgtcgacagcttcaagcatgtcagtgggcgggaagcagctgaccacgtacttcaccgcatcgctttcatcggcattggtgccatcctcatacctcggatcgtcggcggtcaaccccaccagcagcgacgtgttgccgccggacgacgtgccccagataccgagacggtcggggtccacgtgccattgacgtgcgtttgccctgagatagcggatggctgctttgacgtcctcgagatatgcggggaacatgtcgtgggggtcgctcgaggcatcgcgatgattcaccgtagccaccacaaagccttcgcgggccaaagccgagagctgcgggatctcgtagtcgcgatgcggcgtggtccaggcgctgccttgcacgaataccacggtggggtagcggcggtcatcgtcatcgccggtggattgtggtgagatgatatccatcaccaggttatcggccccggtcttgtacgccacgttgcgggtcagcgtggccaatccggcaagcgtgggattgtgcgggatatggatggcattgtttgcgccggcattggcatcggtgactttggctgaatcggcagtgttcatggaatccccctagctctgttgctatagaggtcatcatacaagaaataggcatgattacggcacaacgatgtctcggtcacagcgaagacatgaaggcgcgaagacgcgcccggcagcgcgcgctgcctgcctgcgagttgccttcaagtgcacttcaagcgataaggtgacataagccgcggcaatggagattgctgcccggcaacgaggcggacagtgcccgttcgccgattcgcgataacagaaatgagacactatgaagactcaggaaatcggacaatccggcatgattgcgtcacgagtggcgctgggcgtgatgcgcatggacgcgttggatgccgccgatgcggcacgtaccgtggccgtggcccatgattctggcatcgactatttcgacacggcggacatctatggattccatgatcatgccgcgcacgccagttcgaagcgtttcggccaagcgtggaaggacgcaggactcgaccgcagcaccatcttcatccaaaccaagttcggcatcgactacagtttcggcgaaaacgatggcggcgccaacggatatgacttcagcgccaagcatctgattgacgcactcgatcacgagcttgaggctttgcagacggattacgtcgacgccgtgctgctgcaccgtattgacacgctgtttgagttgaacgaggtcgccgaagcattcgacgcgttggaatcaagcggtaaagtgcgtcatttcggagtcagcaatatgggcccgtggcagatcgaactattgcaaagcggccttcgtcagaaattggaaatcaaccaactgcagttcggcctgatgcatacacagatgctcgacgctgaaatccaattcaatatggcgagcgatcccgcagccgatcgcaccggcggcatcctgccttattcacggctgaagcatatgaccattcaggcatggtgcccattccaatccggcacggaatacggtccgttcgtcggcaacgagcatttccccgagctgaacgccgaattgacccgtcttgccggcaaatacggttccacgcccaacggcattgccgtcgcttggattctgcgtcatcccgccggtatccagccgttgctcggctcaatgacaccggagcgcatccgccagatggcggccggtgccgatatcgaactcgaacgccgtgactggtggtcgctgtatcaggcagccggcaatccgttggtgtgagcgagagatgacgagaccactgccgttgaggcgcgtgttcagcgtgcatacatctcaacggcagtcaatgctgtgtcaatccacccacgacgagaacaacgacacgaacattccgcgaatcacatcagaacgacggcatatcgagcgagggaactgaatcatcggccttactggtcccgttcgcgggcgagccgacatcgtgattgtggaaccactcgacaacccgtgtttcactcatcggcatcaaatcccaagcatccaagccaacattcagtgcctccgggcgtgcaccaccgagtccctcaatctcaaccgtatcgtgcggctccaaactttcgaacaggttaagtgcggggcggtcttccaaccaccagtcgtgaaatacctcatgacagtcgccttcccttttcggcgtgcagcaatcgtttcccatcctaggcgcagccggcacctgtcggttcgtgttgccataatgaggcgcattgcaggggaaccagtgaacgcaagctgccagccatcgtgacggcgaacgggttgagaaaggcgctgtgcctgacccttggaacctgttggccaacaccatcgaagggagcaaacgatgtcttttgacgccgccgcattcggcccgatcaccttgaaccacctgccgccgttcgcccagcgcctacgacatgcagtacacgtggaaacccgaatgggacgtgtgaggcgcacgatggatgagcggtgggcgcgtgctttgcgtgccaagggcattgatattgacgaggctgacggtgctggtgggaaacaggcacacgacggcaaacggcataccgacatcacgggtactggtcgacgccccgagtcccagccggctgccgggctccgcggtcgatccaataccagtacgaatctgccggggccgaaggtgacggcacgcgccacgccattcaaggccaccggtcataagggcggcatcagccggcaggggaattgagctgatcgcagaaccatcgcgcgatgaatgggcgcggccaacgccattccgccattgttgagccgcttctacttggaccggtacctctttgaacggagatatcattccgcaaaaggtcgaatgtacctctttgaacggagatattccatattgaagctattccggcatcatatggtacgtaggaaatcccggatatcggcgatttcctcatcacagatggcatgggccatgccggaatactcgcgataggtcagatgtccggcccgttcaaggacctgatgggccgtttgctggtcgggcagcggaatcgtgcggtcctgcgcgccatacgccaggaagaatcgggtaggggagtcaagcgccgcctgttcctcgcccatgaacgaaggactgagcaggatcgcggcatcgaacaacgtcggatgcaccttgaccagacgatacgacagataaccgccttgggagaaaccgatcaatatcttcctgcgatgggcgaatgccgaggcatccagcagtgaagccaccgcatccccgaccgccgcgcattcgcgttggcgctcgtccacgccgcagccgtcgggataccagtaattgccgcccatatagggcctcgcgtaggtggcgcggaacgagatatagctgggtacggcggcaattgcggccggggccgcatcggctcgcgtcggcgcatatacggcgtcgagaatccgcatcatctcgctttcgtcgttgccgtaaccgtggaacatcaggaaaatggggtcattgccgccggcatcgatctggcttgtcatctgcattcgcatcgtcatcacctcaccagcgagcttacatgcattagacttgtagcgattgacccaccgagcacgcaaggagcaagttatggagccgaggcgcgggcctctcaccgcaggcgagaaagtgcagttcaccgaccgcaagggcaagaagatcaccgatcagcttgtggccggcggctccacgcagaccgagcatggcctgattctgcatgacgatgtgattggcaagaccgaaggcaccgtaatcctcaccgtgcatgccaagcgcgaggcacaggtcaatcaggtctaccccgagaaagacaagaacaagccgtggaaatcgtcgcgcgccatcggcggctgggagtatgcggtgatgcgcccgcgactggccgattatgtgctttcgatgccgcgcggcgcgcagatcatgtatccgaaggacatcgcccaagttattcagctcggcgacatccgctccggcatgcgcgtgcttgagtccggtgccggctcgggcgcgatgagcgtgaacctgctggacgccgtgggcgagcgcggccacctgaccacgatcgagctgcgccccgaattcgccaaggtcgcccaagccaatgccacgctgtactatggcgaggcccccagctggtgggatctcaaaaccggcgacttcgattccgttgccgccgaactgcccgaacactggttcgaccgcatcatgctcgacatgctcgacccgtggaacaggctcgagcaggcataccgcgtgattgcccccggcggcgtgttggtcagttacgtaactaccaccacgcagatgagccgcatggccgaagccctgcgcgcggccggctgctggaccgagccgcagatccaggaatcgttcgaacgcacatggaaggcccagggcctcgccgtacgccccgaccaccagatgatcagtcataccggtttccttgttatctcgcgcgccatggcctccgggttcgaggcgctcagaaagcgcgatcgcgtgaccaaggacacacagaccgacatcgactcgctcaccgacgaacagcgtgaggcgcagatcgaggaactggaactgcgcgacatctccgaccacaaactacgtaaggtgttgcgcgacctcgatcgtcaggtgggggaacttggcaacacgcacgaataaccgccaaacgatgagtttgtgaacgctcacacacctctatactggaagcaacaccacaccgccacaccgccacaccgggcagacggttcgtgaagggagccacggatgggcatcaagctgagtaaagtcgccaaaacagcgaagaaatacgaccatatcctcatcatcatgaggcacgccaaggccgagccgttcggcgacaagggcgactcggagcgcgagctcaccgacaaaggtctgaaacaggcgaaggccgtgggcaagggcatcgagtcgctgggactggtgcccgaccaaatctcctgctcgtccgttacccgcacacgccagacactggaccgcatgctcaagacttttggcgacaagccgatcgtcgactaccgcatcagcctgtatgacgggggagtgcaggcggtgttcgacgagctcgcccacgtcaaggccaagaaccgcgtgttcatgatcgtgggccacgagccgactgtgtcgatcagcgcccaatggctcgcctccgccgactccgacggcgaacgactcgacctgctgaatttgggactttcgcccgcgtccatcgtgatcatgggatcgaacaaaccgttcgacgaatggcaggtgcacagcggcgaactgctcgcggtcatcaatgtgaaagacttcgactaaagcggatataaattccatctataacgacactctacggccatttataagggccggaatccggatgttttgctaccctaagtcgggttacgaacgcatacattggaggattcatgtccactctgacttccgtctccggcttcccccgcatcgggcagaaccgcgaactgaagaagatcatcgaaggctactggaagggtgccaacgacctcgccgccgttaaggccaccgccgccgaactgcgcgccaagcactggaagctgcagcaggccgccggcatcgacctcattcccagcaacgacttcagctactacgatcagatgctggacaccgccatccttctcaacgtgattccgcagcgttacgcacgtctctccttcgacaaccaggaggacacgctcttcgccatggcccgcggctaccagggcgacaagggcgacgtgaccgccctgccgatgaagaagtggttcaccaccaactaccactatctggtgcccgaagtcgagtcggccgcggagatcaagctcaactccaccaagccgtttgacgagttcaacgaggccaaggcgctgggcatcgacaccaagcccgtgttcatcggcccgtacacgttcctgaagctcgcccgtaccccggaagccaccgaactcgagctcgacaagggcctggtcaacgccgtggccgccgtctacgtcgaagtgctcgccaagttcaacgagctcggcgccgcatgggtccagctcgacgagccgtacctcgtgctcgacaaggagccgggcgacgttgaactcttcaagaccctgtacaccaagatcctgtccgccaagggcaatgtcaaggtgctgctcaacacctacttcggccacatcgccgacgtgtacgagaccgtcaacctgctcggcttcgacggcatcggcctggacctcaacgaaggtcgcgaggagaacctcgaagccgtcgccaagtatggcgtggcctccaacaccaccatcttcgccggcgtgatcaacggccgcaacatctggcgcaacaactacgccacctccctcggcctggtcgacgccctgaagcaggtcaccgccaacgtggccgtctccaccgcatcctccctgctgcacgtgccgttcagcaccgaaggcgagaccggcatcccggccgaagacctcaagcacttcgcgttcgccgtccagaagctcgacgagctcaaggaagtcgccgccctggccgacgccaccgaggacgagaagaaggcatccgccgccctcgccgccaaccaggctctgttcgacggcacccgcgtggccgccgacccggccgtcgccgagcgcatcggcaagctgtccgacgccgactacgtgcgtcagcctgcccgcgaggagcgtcaggccctgcagcgcgaggccctcggcctgccgctgctgccgaccaccaccatcggctccttcccccagaccaaggagattcgcgccgagcgtgccaagctgcgcaagggcgaggtcaccaaggaagcctacgacgagttcatcaaagcccagatcgacgccgtcatcaagaagcaggaggagatcggcctcgacgtgctggtccacggcgagttcgagcgtaacgacatggtcgaatatttcggccagaacctcaacggcttcctgttcaccaagaacgcttgggtccagtcctacggcacccgttgcgtcaagcccccgatcgtctggggcgacgtttcccgcgccaacccgattaccgtggaatggtccgcgtacgcccagtccaagaccgaccatgtgatgaagggcatgctcaccggcccggtgaccatcctcaactggtcctggccgcgcgaggacatcacccacgaggagcagaccaagcagctcgccctcgccatccgcgacgaagtgctcgatctcgaggccgccggtatcaaggtcatccagatcgatgaggccgccctgcgtgagaagctgccgctgcgcaagtccgactggcacgtcaagtacctcgactgggccgttccggccttccgtctggtgcactccgccgtcaagccgaccacccagatccacacccacatgtgctactccgagttcaacgacatcatccgcgacatcgacgcgatggatgccgacgtgatctccttcgaagcctcccgtggcgatctggtggtgctcgacgccattcatgacgcgcacttcgagaccgaggccggcccgggcgtctacgacattcactccccgcgtattccttccgagaaggagatcgaggatcgtatctacgagatccttgacaagatggacgtcaagaaggtgtggatcaaccctgactgcggtctgaagacccgtggtaacgccgagacctggccgagcctggagaacctggtcgccgccgccaaggccgtgcgcgccaagctcgacaagtagcggaaatcaccgagctccctctggatgagggagctcgggtttatgtaaggaaatcagcatgcattccccgatgttcacccttgaggtctttcccccgaagcgcaacgcgcctgtcggcaccatctacgacaccctcgacggactcgaagggctgaaccccgacttcatctccgtgacctacggtcacggcacccattccgaccgcaccgccaccgcgcgcatcgcccacacgatcagcaaggaatacggcatccctgcagtcgcccacctgaccgcgctctactccgacaaggccaagatcgatgaggctctcgacatgttcgaggaagccggcgtgagcgccgtgctcgcgctgcgcggcgactacatcgacggcgagcagctggtcggcgagttcaaccacgccagcgacctcgtgtcatacatccgctccgtgaagccggacttcaaggtgtttggtgcttgctacccggaaggccactatcaggctgactcgctggaccaggacatcgaaaacctcaaaatcaaggttgatgccggcgtcactcacctgatttcccagctcttctacgacaatgaggacttctaccgcttcctcgacaaggcgcgcgccgccggcatcaccgtgccgatcgaggcgggcatcatgccggtgcgtggcgccaagtccgtgcgtcgcatggccgagcgcaacgcctcgcgcatcccggacaggctcaacaccctgctgaacaagtggggggacgacatccagtccctgcgtgccgccggcatcctctacgcttccgagcagatcgccgacctcgtggcccacgacgtggacggcgtccacctgtattcgatgaaccaccccgccaccacgcgccgtatctggcgcaatgcggaaccgttgttccgcggtacgcaaggttgacgcatatcgcggcgcggcgcatctcaatgcgtcgcgccgcacgttaatctgctggcgaaacccagagttctcccagcggccgatgggtatcatgaacgtgcaagccaaccaaagcgatggaagggagtccgttatgtgcactggtgtccgtttctccgatgatgagggcaacacctatttcggccgtaatctcgactggagtttctcatatggggagaccatcctggttactccgcgcggctaccactatgacacggtgtttggtgcgggcggcaaggcgaagccgaacgcggtgatcggcgtgggtgtggtcatggccgataggccgatgtatttcgactgcgccaatgaacatggtctggccatcgccggcttgaatttccccggctacgcctcgttcgtccacgaaccggtcgaaggcacggaaaacgtcgccacgttcgaatttccgctgtgggtggcgcgtaatttcgactccgtcgacgaggtcgaggaggcgctcaggaacgtgacgctcgtctcccagatcgtgccgggacagcaggagtctctgctgcactggttcatcggcgacggcaagcgcagcatcgtcgtcgagcagatggccgatggcatgcacgtgcatcatgatgacgtcgatgtgctgaccaatcagccgacgttcgacttccatatggaaaacctgcgcaactacatgtgcgtcagcaacgagatggccgaaccgacttcatggggcaaggcctccttgaccgcctggggtgcgggtgtgggcatgcatggcatcccgggcgacgtgagttccccgtcgcgcttcgttcgtgtggcctacaccaacgcgcattacccgcagcagaacgatgaagccgccaatgtgtcgcgcctgttccacaccctcggctccgtgcagatggtggacggcatggcgaagatgggcgacggccagttcgaacgcacgctgttcaccagcggatattcgtccaagaccaacacctattacatgaacacctatgatgaccccgccatccgttcctacgccatggccgattacgatatggattcctcggagctcatcagcgtcgcccgatgactccttcccggctcatgccccattcggagggcatgagcgtatatagtggaatcttatggaatcgtcgatcttcaaacccagctccatggacctcatcagggcaggtctgcaagacctcgacaaggcccgcgccttgttcgaccagctcaaggcggacgacattcccgatgagcgatgcgccgaactgctgagcgcgctggcccacgcctgcgaccccgatatggcattgagcaatttcgtggatatcgtcaacgcgatgcaatccagccagcgcgatctggaacacgtcatctccgacaacgacgccctgaagcgtctggtcacggtgctcggcgtctccgacgcgatgggcaagttcatgcgcttcaagccgcagcttgtggaggcggcagcagtcgacaactgcaacagccatctgttcaatcacgcgcaacgccgtgcacgtctgctcaaggcggtcggcgcggacccggacgaaccggccatgcccgtcgcctccaaggatctggccgaagcggccacggccttgcgttccagctaccggaaccaactggccgccatcatcgcccaggatgccgtggcggacgacccgacctccatccaaccgaccatcagccgcgaactgtccgacctcgcggacgcggcgctcgaaggcgcgctggccatcgcccgtcacgaaaccgagggcagcgagcacgtgcgcttcaccatcatcggcatgggcaaactcggcgcacaggaactgaactacgtctccgacgtggacctcatctacgtggtcgaaccggccgacaaggacgtggaccatcagacgctgatccgcgtgggcaccaagatgggcaccgtgctgcagcgcgtctgccagtccgccatcatgggcgtggctgagcagccgctgtggcagatcgacggcggcctgcgtccggaaggcaaggacggcgcgctggtgcgcgtgctctcctcgcacaagaactattacgagcagtgggccgagaactgggagttccaagcgctgctcaaggcccgcccggtggccggcgaccccgacctcggccaggcctacatggacatgacccggccgttcgtgtggagcgcgtccaagcgcaagaacttcgtctacgactgccagaaaatgcgcaagcgcgtggaggatttgattcccgcgcccctgaaggaccgcgagattaagctcggccgcggcggcctgcgcgatgtggaattcaccgtgcagatgctccagctcgtacacggccgcaccgacgaatcgttgcgcaccagcaacacgctcgactcgctgcagcgcctgtccgaaggtggctatgtctcgcgcaagcaggccgtgcgcatgtcccaggactaccgcttcgagcgcgtgatggaacatcgccagcagatctggtccctgaagcgcacgcacctgttcccggacctcggccgggcctcggtcggaggcctcgaaaagaagcgcgacatcgacgtggacgagctcaaccagaaccaggaactgcgccgactcgcccgcgcattcggcctgcacccggaagaactcgtcgacaagtacgacgacacccgccgcgaagtacgccacctgcacctcgacatctactatcgcccgatgctgccggtcaacgcccagatggagaacgaccagatcgtcctgagcgtcgaggcagcacaggaacgattcgaatccatcggtttcggcgacccggacgccgccatccgccacgtgcaggcgctcactgccggcgtgggacgcgcggccaaaatcaaccgcatcatcctgcccgccgtcttgcagtggctgggcgagggccagaacccggacatgggcctgctcaactggcgcaaactggaggagaacttcggcaccgaatccggctacctcggcttcctgcgcgactccacctccgccgcccagcgcctgtgccacatcctgtccaactcgcgattcctgggcgacgcgctcaacaagtcggtcgaatcgatcagctggctcggtgatgacgacaatctgcaggcccgcacgcgcgaggccttggacgtgcagaccggctcggcgctggaacgcttcggatcgaacatcaacgagttcgccacctccatgcgcgccatgcgccgccacgaaatcgaacgcatcggcctgtcttggatgagcggtgtgatcagcgactccgacagtctcaaggccatgaccgacgtgtatgacgcgatcatcgatgcctccctgacctgggccgtgcgccaccagatcgccgagttcggcgtcgaaaccgcgccggccggcatcaccgtcatcgccatgggccgttacggcgggcgcgaagtgaacttcagctccgatgcggatgccattctcatctaccgtccggccgacgatgccgacgacggccaagccaacgccttcgccaggaaggtcgtggaagacctgcgcaacatcctgcaaggaccgacgacgctggaacccaagatcgaactcgacctggacctgcgcccggaaggcaagaacggcccgctcgtgcgctcctatgcctcctgcgaggaatactacgaatcctgggcttcgacctgggagcgccaggcgctgctgcgcgcccggtacgcggccggcgacgctgaactggcgcgggacttcctgatcaacatcgccgatccgctgcgctacccgaccacggaactgactgaagcagaattgcagaacatccgcaagctcaaggcccgcatggaagccgagcgtctgccgcgcggcgtgcgccgtgaacggcatctgaagctcggcaagggcggcttgtctgacgtggaatggaccgtgcaactcatgcagctccagcacgccggcgatatcaaagatctgcgcgtcaacggcacgttggaggcattggacgtgctggaagccaagaagctcatcagcgctatcgacgcgattcagctgcgcaaggcatggacgttgtgcaccgcggcccgcaacggcagctatctgtggagcgggcgcgccaaccaggccgatattctgcctgatgacatctattcgctgggcggcatcgccgcctacctcggctacggcgcccaccgcggccagcatttcgagaacgacctgctggccgtgatgcgcaaatgccgtgacgtatgccagcgcttgttctatgggcagaccgaaggcgaggcggctgcggcaaccaccgccacggcctccgccgcaacgcagcagccgcaaaccgcccctcgcccgcgtatgcacgtgatcgcaccgcgactggaacgaaatcgacgccgcgcgcagcgataaggcagcatattcgttggattttcaggtggacactcggtgaatgcggctgtccgaaaaatggcgtaagttagattaggtcacgcaagggtggccacctgaaaaccacgagcgaaaaggtgagccttgtctgaagaaacgccaatggtcggcaaaagcgtcgtaacgctggacggcctgtctacaaaccagattctcgacctgctgcataaggccgaatacatcgattcccaccgcaaagaggttgcccatacctgcgatgggcgagtgctggccacgctgttctacgagccctccacccgtacgcgcctgagctttgagaccgccatgctgcgtctcggcggcaaggtcatcggattcgccggcgcgcagctggcctccgtgaccaagggcgaatccatcgccgacacgttgaagaccgtgtccaactacgtggacgtggtcgccatccgtcacccgaaggagggtgccgcgctggtggcctcccgcgccgcatccgtgccggtgatcaacgccggcgacggcggccacatgcaccccacgcagacgctggccgacctggccacgctgcagtcgcgcttcggccgcatcaccgacctgaccgtaggactgtgcggcgatttgaccttcggccgcaccgtgcactccctgatcgagaccctgtgccgcttcggcaacgtgcgcttcgtgctcatcagcccggacgagctcaagaccccgcagtacgtgatcgaccgcatcaacgccaccgacagctgctcctacgtggaagtgcgcgacctggcctccgtgatcggcgacctcgacgtgctgtacatgacccgcgtacagaaggaacgcttcttcaacgaagacgactacctgcgcctgcgcgacacctacattctcgacgaagagaagctgcagctcgccaagccgtccatggccgtgcttcacccgctgccgcgcgtcaacgaaatcgccgtggacgtggacgacgacccgcgtgccgcctacttcgaacaggtcaagaacggcatgctcgtgcgcatggccctcgaaagcaccgtggtgggcgacgaactgcccggatacgaaccgctcaaccccaaggaggttcaggcctgatggaagtcaccagcattcagaacggcatcattatcgaccatgtgccggccggaacctcgctgaaggttctcgaatacctgaaaatcgacccggccaaaaccaagcttgcgctcatcatgaacgccgactccaagcgttacggctccaaggacatcatcaaaatcgaagatgacaaggacatcgacctcgacgtgctcggcttcgtggcccgccaagccaccgtggacgtggtgcgcggcggcaagatcgtcgaaaagaagcagccgaacctgcccgagcacatcgtcggcgtgatttcctgcgtgaacccgcgctgcgtgaccaccgccgagcccggcatcaagcagatgttccacctcgtgcactccgagcggctcgaataccgctgcgactactgcgacgaggaagccaaactgtgagcatcaccctacgcaacatcaaggtctggaacaccggcgaggtcatcgacctcgtggtgcccgggaccgctgccgcctacttcgccgacacctccgccgtggctgacggcgccgacatcgacgccaccggcctgaccgtggcccccggtttcgaagacccacacgtccacttccgcgatcccggccagacctacaaggaatcgatggtctccggctgccgtgcgtccgcatccggcggatacacgaacgtgctcatcatgccgaacacgttgccggcactggatgggcagaccgtgtctggcccggaagcgaccggtgcaaaagaggttctggatgccggcttcgacaacgtcatcgacttcctgcagcagtacgatactgcgcatgacgttcaattgccggttcgttacgatctgtgcgtgtgcgcgtccaaggatcgcgccggtcatgaggcaagcgacgttgccgattggctcaagtacgtgcccggattcgaggacgacgccaagacgccggccatgctcacgcaccccatcaccgcaatcagcgacgacggttccgctgtgacgccggagatcctggaccaggtgctggagaacgtcaaggcctccgacctgtacctgatcgagcattgcgagcatcacgatacaggtgccgtgaacgaaggccccgtttcccgcgagcttggcgtgcccggcattccggaagacaccgagctcaagatcgtggcccgcgatatcgaagcggcccgccgcactggtgtccacgtacacttccagcatgtgagcactgccatctcgttcgaggcgattcgcaaggccaaggccgaaggactgccgattacctgcgagaccgcgccgcactatctggcgttgagcgacgaggcgctgctcaagtacggcacgctcgccaagatgaatccgccactgcgctccgaagcggaccgcaaagccaccatcgcggccatcgccgacggcaccgtggatctgctggccaccgaccatgcgccgcacacgttggcagagaaggaactcggcttccttgaggcgcccaacggcatcatcggactggaatgcgcgtacggcgtgtgccacaaggtgctcgtcgacggcggcttcatttccgatgagcgtctgatcgagctcatgtccgttggacctgccgaactcatggggcatgtgccaaccgacgtggccgcgctggtcgaggactacgccgaacccgcgcccaccggggatgatccggatggcgtgattgcgggggagagcgacgctcagccgcagcgtgaaggcgtcaaccgactgctcgacttgagccgcgtggatgacgccgacaatgtcgacctcgtggtgctcaacaccgccgaggaatggaccgtggaccccgaacagttccactccaaggctcgtaacaccccgttcggcggctggcaggtcaccggacgccccctcgccacaatcatcggctcccagctgatgttcagccgtctgtagataacacaaggagcagcatggatcgcctgatcgaagcgattgacaacactcagaaccccagcgtcgtgggccttgaccccactgaggcgctggtgccgccgcaggtcgtggcgagctttgccgacgaggtgcgtgactcggtcgaatccccggaggaagtcgaatccgcgcagctggccgtcgcctacttcgaatacaaccgcacgatcatcgacgccatcgccgacatcgtgcccgccgtcaaaccgcagatcgccatgtacgaggcgctcggccccgccggcgtggacatctacacgatgacctgcgaatacgctgcccagcaaggcctctacgtgctcggcgacatcaaacgcggcgacatcggctccactgcagccgcctacgcccaccacctgaacggcgtgggcgacttcgacccgtggcatgaggatgcggtgaccgtcaacccgtatctcggcaccgacggcatcaccccgttcgtcgaggccgccgccgaagccgacaaggacatcttcgtgctcgtgcgcacctccaacccgtcctccagcgaactgcagatgctcgacctggccgacggcacgaaggtctacgagcatgtagccgatctcgtggaaggctggggcgccgagaccatcggcagccacggctactcccgcgtgggcgcggtggtcggcgccacccaccccgaggaaggcaaggcgctgcgcgcgcgcatgccgcacacgttcttcctcgtgccgggctacggtgcgcagggcggcacggccgcggacgtggcaggcatgttcgacaagcagggcagcggcgccatcgtcaactcgtcgcgcggcattatcggcgcatggaagaagagcggcaagtactccgaatccatgaccgccgacgaggcgctggaccttgtggcgagcagcgcgcgccaggcggcgctcgacatgcgcgataatctgcgggttgccgtatataggtaggtagattgtccggctgtgggctatacgtgagtgtgggctggaaaccggagccgagtgtgtttaactacctctcagtcaacctgcggttgaccgctcccctgataaggggagcttgatgtgctgaataggaatgaaatgacaactttcacccccacccatgatgtggttacggaagcgactgcggccggattcttcccgccgcgccacaacgtcgaaatcacgcaggttacggaactgaccgaccgcgtgatgcgactgacgttccgcgacccgttcatcgcctcccatgccaagcccgcccagttcgtcaacctgttcacgcacgacgacttcatgctcatgccgcgtccgttcggcgtcagcgaagtcgacggcgacgaagtcagcgtgatcttcgccgtcgtgggccacggcaccgaacagttggcaggcctgcaggccggcgacaccgtcgacgtgctcggcccgctcggccgcggcttcaacctcaaggaagacgccaactacattctcgtcggcggcggactcggcgtgcccccgctaatctacgccgcgcaaaagctcgccgaacacgacgcctcctttgccaccgccgtattcggctaccgcaacgaccacttcgccgaggaatacgtctcccggtacgcggactggtcgtggagcatcgacgacgccgaaggcaacgtggtcgacctgctcaacaaactggaacaaggcgacgacctgaaggcctacgatcgcaagccgatcattctgtcctgcggaccgctgcctatgatgaaggccgtggccgactgggccgccgaacgcggcatccccgcgcagctgagcatggaacagcgcatgggctgcggctatggcacctgcgtgctgtgcaccatcgacaccgtggacggccgcctcaaggtctgctccgacggacccgtgttcacccgcgaacagctcggatgggggaagtgacgatgagcgcaaacaaccagtccgcgcagggcggcgacaaccacatcaacctgtacgagccccacgtgtggaagcaccacaccaaggtggccggtctggaatggaagaatccggtcggcaccgcctccggcaccttccagtacgccgccgtccgctggttctacgacgtcagccagctcggcgccgtatgcaccaagggcgcctcgcccgtaccgtgggaaggcaatccctcgccgcgcaccgccgaatcgccggccgcgaacatcaacgccgtgggcctgcagaatcccggcatcgaccattacttggccgaggacctgcccaagctcaaggccgcgggcgcgttcgtcatctccaatgtcgccggacattgcgatgacgattacgcggcggtcgtggaaaagctcgccgactccgacgcggacatgctggaaatcaacgtcagctgcccgaacgtttccgccggcggcatgagcgtgggcaccgacccggtggccctcgccaatcttatggaccggctgcgcccgatgaccgacaagccgatgatcgtcaaactcacgccgaacgtcaccgacatcaccgtgccggcgcgcgcggccgtggaacatggcgccgacgcgttgagcatgatcaacacgctcaaaggcatgcgcattaacattcgcaccggcaagccgatcatcgccaacgtcaccggcggcgtatccggcccggccgtgctgccggtcggcctggcagccgtctatcgggtgcgcaccgcactgccggagattccgatcatcggcctcggcggcatcgacagcggcgagaaggcgctcgaatacctgtacgccggcgcgaacgccgtcgaagtgggtgcggccgcgctcttcgacccggtggccccgctgcgcgtcgcccgcgaactcgacgacctgttggacagccgtcccgaactcgctgctaaactggccgcaggacagacttggaggtaaggaacatcatggcagaaacactcgcacatcgcttcactgaattcctgttggaatccaacgcgctgaagttcggcgacttcacgctgaagtccggccgcaagagcccgtacttcatcaacgccggcgccttcgacgacggcaagaagatcgccgcgctcggcgcgttctacgccgaaaagattagccaggccatcgtgcacaacacgattccccgcaacatcgacaccgtgttcggccccgcctacaagggcattccgctggccgtgtccaccgcgatcgcgctgaccgccggccacaacatgaccgtcggatacaccttcgaccgcaaggagaagaaggaccacggcgacggcggctggatggttggcaccccgctgaccgacggcatgaaggtgctgctcgtggacgacgtgatgaccgccggcaccgccgtgcgcgaagtcatccccaaactcaaggccgaggcgaacgtcgaggtcgtgggtctcgtgctctccgtggaccgcatggagaagaccaaggactccgacatgtccgccgtgaaggccgtggaagccgaattcggcttcccggtgctctccatcgccaacgtgcgcgagatcttcgacgccgccgccaagatgaagaaccccgacggcaccccgctgctcagccacgacatccagcagcgcgccgccgcctaccttgaggaatacggcgcctgatcgtcttcaatctaaaaaccaaaagcgggcttgcgagcccgcttttttttattacgttccatgaacagcagcaccatattaaggcaaaagctttggcaaggagcgtgctatgaactggttagttgatatagggctgtttgcgctcgtggggatatgcagttacttcggcatcgagcatcatctggacagcaaagcgaacaagttgtcgcaaggtaatgaagaagaccgccgagatgctgatgcccaagtagaagcagcatgaaaatggcggaatgacgttggggtgacgccgctcatactcgggatatgacggatgaacagcctcttgaaacggagataaatgtctccagaaggccaaatcagctcccttgaaagcgagatagggttctaaactctgggaccgactcgcctgtgatgaaaacccgctcggcgtagaattaccgtaggttcgttgcattcgaacaaggaaggccgctatggggaacatcaccgacgatattcggcaacatttcgacactttcgccgaactgccgttcaccgaggcggatagcctcgctttgtcccagttggcctatgctcgcatgccggataacgtgccgcgctatcacgagaatgcagagaccgccgacggcatgatcgccacggttccgattcacgatttgctgcgtgccgaatgctatgacgacatgttcggcaaggtgtggtcgccttcgatgaatgtcgatctgttacgtgcgatgagcgagagcccacgttggaggaacctacgcgtgggcgcatacgtggacgaattcgatgctgcaaccaccaagcagttctcggcctgcgtgttcgaactgggtaacggcacgctctatgtggcttttcgcggtaccgacagctcaatcgtcgggtggaaagaggacttcatgatggcgttccgccgcccggtcgcctcgcaggaggccgccgcgcgttatctgaccgagctggctggccattgggccgggccgattatggtcggcggccattccaaaggcggcaatctggcggtgtatgcggcggccaatgtgcctagcgagattcaggaacgtatcacggtcgtatattcgcacgatgggcctggattcgatgaggtgttcttcgatgaggacgggtacgtacgcattgcgtcgaagatccataaatcggtaccgggctcgtcgatcatcggcatgctgtttgagactcgtgagcatgtggaagacggctatacggtggtcagcagcgacggtgccagcatcatgcagcatttcgcattgcactggcaagtcgatcatggccaattcgtacaggctgatggactgacaagtagcgcgcaatacctggcacgcacgatcaacggatggatggcaaaatacgacgacgagcatcgccgcaagttcatcgaaaacctgtttgccatcttcgaggctggcggatacgacacattcggcgacctcacttcgcatttgacacagtcactgccgattatgctcgccgcggcccgcaacattgatgtcgaagatcgcgacgtgatgattgaagtgctcaaaggcttcgccgcgacagccgccgcgtcggtaatcttggccaagtagtcggaggccatcaaactggttttgccagtcagtctcaatagcgcaaaagccggcccctgagatactcaggagccggcccttacttccatttccccagcggggttggcttaatcgcagtatatctcactgctgaccatgcctgttttacttactcctaatcaatgagcttgtagccgtggtcggagactacggacttgagcttgtcgagataggtttcggcggccttggagagcttggaacgctcgttcgtgatccagccgaccaacatcgtttcgtcggtgtcgagcggcacggtgacgatcttctcgttgttgaggtcgccgttgtcgatgccggtgcacaccgtgtagccgttgaggccgatgatgaagttcaggatcgtggcgcggtcggtcacgttgatctgcttgggggagtactccggccagaccgcttcctcatagaagtagaacgagccttcctcgccctgctcgtactggatgaacggataaggtttcaggtcctccatggtgatgaccttcttggcggccagcgggttgttgcgcgagatgaacacgtgcagcggcgcgcggaagagcgggtggaattcgaggtgcttctcgcgcaggagcttgccgatcacgtccttgttaaaatcggacaggtagatgatgccgatttcggactgcatgttggcgacctggttgatgatgtcgcgcgtgcgggtctcgcggatggtgaactcgtattcgtcggacttgatggagttgatcatctccacgaacgcctcgacggcgaacatgtagtgctgggtggagacctggcacagctgcttgcgcggtttggcatgcttatagcgctcttcgagcaggtcggcctggtcgagcacttggcgggcgtaggtcaggaattccgcgccgtccacggtcagggcgatgccctgcgaggagcgggtgaagatctcgatgcccagctcgttctccaattccttgaccgacgagctcagggccggctgggagacgtacagggcatgggaggcctcgttcatcgagccgcactcgacgattttgacgatgtatttcagctgcagcagtgtcataaagtctatttatatcgctagggatagtcgccacacggccggtcaccgtcgtcaaggacgggtccatagacttcaactgccgcgatgcaacgtttggcgacttacagacgtacgccgagttctgcgagcgattcgcgtgcctgcaacgcgttctcgaagaggatgccgtggatgccgacctcgttggcgccgacgatgttcttggcggtgtcgtcgaagaacacgcagcgctcggccgtgaggccgaaacgggtcagggccagctcgtagatgtcggcgttcggcttatgcatcttctccacgccggagaccacggtgccctgcaacagctgttcaaggcgcgggtacttctcgaaggccaggtggaaggtctcatgcgaccagttggtcagaccccatacgccgtagccgtgggccttcaaatccgccagcagctcgaccatgcccggaagcgtgcggggcagcgcgtccgcgtagtggccgatgtagaacttgaagatgtcggcgagttcctggccttgttcgcgtaccacatccgggtagatgtccgcgaaatcctcgccggtgtccatgcggtcctcgtagcggaagaagccgcaggggtcgtcgtcggcgcagatgcgttccacgatctcatcggggaatcggccttccaggcatgcgcgggtgttccagtccagcagcacgccgcagaagtcgaaaatcacgtcggtgatgggggagttggccatgatgctccttgtgttgttggggccgttgagtggggtctgcgatttagtatagggggtttcatacgttggctcccctctctgaggggagccaacgtacggaatcatgcgatgacgtcggcgatggcttcggggatggcgtgggccacgtcgccggccacaatcgggtggccgagcgtcatgaagcgctggcgatgctcgcggccgatcagttccggctcctgccagccttgttgctcggattcggaggcgatcgccgccgccaggccatgcaggtaggcggccgaggccacggtctcgcccgtggtggccacgtcatcctgctgggcgagcagggcgccggtcagaccggccagcacgtcgcccgcgccggcggtgcccagccaggccggtgcgctacccgacgcatagacgtggtcctcatccaccacgatggtcaccgcgcccttcaacaatacggtggcgccggtgagctcgtgggcacgcttcgcgctggccaacgggttcaaccgcacgtcgtcggcggtgtacggctcgtgcgaatcggcatgctccgcggtgctggcggcggtttcgaaccggttgagcagtttcgccatctcgccggcatgtggcgtgatcaccacctggccgggcacacgctccggcagcaggtcgagtgcgccggcatccaccacgattggcggcatgtcgtaggcgtccttgttctcatcctcgctgccgagcgcgtaatgcttgagcaatgcggcgatggtgtcccgctgcatatcgccgtcggtgccctcgacgctagcctcgggcacgccggaccccacgacccaggactgcacatgtcccttgccgatcacggcttccggcagtgcggcgagcaccatgttctgcgcgcgctccgggcccagataccggaccatgccggtgttcgcgcgggcggcggcgctggcggtgagcacggcggcaccggggtagcgctgcgagccggtcaccagaccaaccacgccccgggagtatttggaatcctcgaacctggggagacggaccgcgtcggacgcgaacgaattatccaccacctcgacgtccggatccttgtcgtcgatatcgaatccgaaatcgagcaactcgatacggccgcaggcgaacgtggcgggcggcagcaccgcgcacggcttcatcgcgccgaacgtgaccgtgaccgtggccggaatgtacgggccgggcagagaaccatcgttcacaccgacgccggatggcgtatccacggcaagtaccagcggaaaatcgcctgacgactcacggtttggcagggcgggctcatcgggagcctcgccgtcgagaccaagggcggaggcgagtgcggcggggatgccgcgtagcgagccttggatgccgatgccggtcatcgcgtcgatgatcagatgcgatttcctggccacggcgatggcggtctgcaatcgctcgccggcctcaccggcggaaaacccggacgcgcaaccgggaatatcagccgcgggatcaagcaccagcaccttgcctccggcgcgcacgaatgaggcgaatccggcctcatgcaacgaccggcccacggcgatggcggtgacgttcgcgccctcctgggccagcgcggcggccgcgaacagaccatcgccaccattgtctccggccccggccagcagcacgatcgacgtgtcctccagcgccagatcctcgtcgtccagcataccggccgccatgtgggccgcggcctgggcggccatgcgcatcagcggcacgcctttgtccagcaggggtcgctccatggcccggaccgtatcggagtcataggcgctgtgcagcagcagttcgcgacgatcggcgtcttcggtgtattccatggcaacccctttcttgtgtttgttacttgcggtccgtgtttacaggccgtacacctcgtgggcgaacttttcgaacacggggatcgagcgcttgaccttctccgtgtcgatgcagtaggccatgcggaagtatccgggcacgccgaagctgtcggacggcacaagaatcaggtcgtattccttggccttcatgcagaacgccacggcgtcgtcctccagcgccttggggaagatgtagaacgtgccgccggggcgtaccacgtcgaagccgatgccggtcagcgcatcgtagagcaggttcatgttcgtctcgtagacgttgagatcggcggtctggtcgatgaccttggccacgcccagctgaatcgagctcggcgggcagttgtggccggtgccgcgcgagatctggcccatcatgggcacgagcaggtcggcgtcggtggctgtgggattcaccgcgacatagccgatgcgttcgccaggcaggctcagcgacttcgaccacgagtagcaggtcagcgagttcgcgtagaagctggccgggtagggctgggtggcgccgtcgaacacgatttcgcggtacggttcgtcgctgatcaggaagatatcgtggccgtattcgacctgcttggcggtcaggatcgcggccagacgcttgagcgtgtccgctgaatacaccgcgccggacgggttgttcggggtgttgataagcacgacctgcacgttcgggttaagtgcagcctcgaatgcgtcgaagttgatttggaagttctcggtgtcggccggcacgatggtcagcttggcgccggcgcccttgacgtacggctggtattcggggaagtagggggcgaaggtgatgatctcatcgcccggcttggtcaccgcacgcatcgcgtgggacagcgcgcccgccgcgcccgtggtcgggaagatgtggttgccggtgtatgccatgccgaaacgttcgttgaggttttcggcgatcgcgtccttgacggatgggataccgagcgagggggagtagccgtggatggccaccggatcgccgttttcgtagaggtcgaccatggcgtcggtgaaggatttcggagccggcaccgagggattgccaaggctgtaatcgaacacgttctggtagccgatttcggcaccgcggctcgtggcgtactcgctcagctcgcgaatcacggacttgccgccaagcatggccttgtattcctcattgatcatggctgttctcctcgcatggttgtactggtatgcaccacgctactactatcgcggccggtttgcgccatttgccgcgccgtgcctaagccggctgttctatttgttctattagtggagtttgaaccggcatatacccttgcaataaagccatttgtagggtctgaggctttccggggttgcttgtctcataggttttcggcctcttgatatttgcggttgatagctgtgatgtgtgtgggcgatggctgttgaggcatcatggggatctcttcgactgttcgccgtcgccatgccgccatgatgcctacagaaagtcgagttgcgtatttccgccaagcagggtggtgaccggtggggggcgatcggtgggggtgaccgacacccgctataggcagcaggcagccgcacacatcccaatatctgtgggacggcagacgagtcaatcgtttgtcgtccgcgccgtccctcaagagcgcgggatggcagacaagtcaaccgtttaacgtccgtagcgtcccacaccgacgactgtagaaaccgtggaataacgccgattctcgctgcagctccatgattatgcacaaccgttcatagcgagcgctgtgggacggcgggcggaaaacggccgaatccgcgtgccgtcccacacctcgtacagtccgcgttttgggaaagcatcaccgtaaggctgacgcgcatccgcatccacagcaggagccttaccggccgtaatcccgcactcgattattttttctgacaggaaatcgaacccgaaacactaacccatgcccgccccaccgcaaacagcgaataaccaaaaaaatgcatgatctatccttggtgccgaataatgagagcctgactgtagtggctacgggtagctatatcggagaaggattcgatcagaagcgtttcgacacgcttctgcttgccgctccggtctcgtttgagggtactctctcgcaatatgtagggcgacttcatcgcgagaatgatggcaagaccgaggttcgtgtctatgattacatcgacgtgaccgtgcctttatccgctgtcatgtatcgaaaacggctgaaggcatacgcaaatcaaggatattcggtaaatcctgaccatactgagaaaatggacatgctcagtgcaaaggcggaagcgttgcgcgcttgcatgacgaccgcgacgcagggcgaagatgctgcggatgcgttgctcgacacccggtctgacggattattcgaaggcagcatcgttacagccacgaattatgcagagatactccgcaaggatattgccggttgcgcacgttccctgattatctcggctgaatatgtatcacaacagggactcagcgcaattgacgatgaattgctccgactggccgacaggaaagcgctcatcgaagtttatgtccgtttgccggcgactgctgcggtggcaaccagaacacgaatagaacggaatattaatcggctgcgtgctattgggcgcattgtccggaccgtcgaatcgtgttccgattttgccataatcgacgacggattgatttggtttggaggcatccctttacttggcaatccaaggagtgacgactgtgcacttcgattcaaagatacgaaaatcggcgagaatctagcagatggactgaaacgacggtcgtcctgagtcaatattcagttaagataatcgcgcagtacgagggcgtgattgatgtgcgggtccttggcggcatagagcagggtcacgtcgggatgctccgcgcagatgtggcgcagattgtccacggcggcattggcgtcgagctcggcgatgtaacgcatgcggaattccgcgaatttggcggggtcatggccgaaccatttgcgcaggaggggagagggagcgacgtccttcagccacaggtccaacgccgcacgctctttcgtcatgccgcgaggccacaggcgatccaccagcacccgatacccgtccgacgcagtcggctcttcatatatacgtttgattgcaatacccatacgccccatgattggcgtgcgcttgccggaagtcaaggggagacgcgatccatctacccgttcgatttctgggtgttctgtctaaggccttgtgctatgacagctagcgattcagcagcttttggtgatatcgtccaaccggaccgccttgcccctgtcgaaggtgttcatagtgagatcgacgggtttggtcttgatgaacgctgacagcgcggtgtgcggcgggttgtcgatcaagtgggtgatgggggcaatcgcctcctcgacgctgacgcccacaatggcgtaaatggcacgcgccagcagcttcatcagtggcgaatcgaaactgttcaatgcctcattgctgcgcacggcccaagggttgaacaacacatagtggatgcggcctccggtctgctgttggttttccgcgaagagcactcccagcagatcgttcagacgactcgtacagatagtcgcgcaatgctagaacgtgattgatgtgcacccttcattgacggtctctcaattgatctcctgcgattcatgccgtataaggaagttctcgaccaaggcgatcatcgtgtccttccccgcaggtgcggacagcgcaatcatcagcgtcatcgccgccaaggcgttaccctccacaagcaggggagtcatcgtcgcccagtatactgttgccgttcaggaaatacacgaacagtgcggcggcacaacgtttattgccgtcggagaacgggtgatccttgacaacttgatacagcaggttcgcggctttctcctgggtggaacggtacagttcttcgcctccgaacgtctggtagagtcctgcgacgattccttggaacgaaccgttgcgttccctcccgaacagatcggattgcgtgtagaacggcatcgaccggatgaacagcatcgcgtcctcataggtcaagacccactgggactcgtcgcccttgggtatagggacattgcctgtgtcatagtcgttaagcagcacaagactcggcaaatatcgttccaagatctctgcggtgccagcaatttccggttcggtggacctcgatagcaccttgacgacggcgtgaagtgcgtcaagccgcttgtgattgatggtgtataaccatcaacgagatgctgcttcagaactgagttggcccatcgccggaaattagatgccttccttggatttgacgcggtatccgaccgacaggatcatatccaagttgtaatgctcgacttggtatgtcttaccgtcagatgcagttgtcgcaaattctgtgacaactgaaaatccattgagctcttccctcaatgcattgccgacatgcttgccgattgttttgatatcgcggccaaacagcaaggccaattgctttctgttaagccacaccgtatcctcgtccaccttcacatcgaggtgcacggtgtggtccgcgctttcgtacaaagcaatctgctgcttcagttcctcgccagtcatgagattacctctctttttcggctgtctgtaaatcatgtcgttggcgtcgccaaattatgcatccagtttatcaggacagtcgaacatttgttcgattactgtatctcgcatctttgtatgactttcccgacgacgtattggctatgacggaggtaatgggcacggggataatgctgatgatgggcatttccatcatgcaaaaacctatgccccgtattgaaaaaagctattggaccaagccgttgggcttaggccatgataattgggccattgcgcggcttatccgttcgacggatgttccggatttgcgatggcgttgaattgcaattatcaaatgaaagagcaaattgtatgagcgaaaacaatgatgccaaacacgtgctgttggtgttgatcagtcactccgatttgggaggtgtgagacctactggcttttatgttgatgaggccgcacatccttggcaggtgttcagacgaatgggcttcactgtgggccttgcatccatcgctggtggcgtaccgccgcaggctggccgtcatcccggtgaccctgtgcaagagcaatttctgcatgatgcggatatatcacgccagctagtgaatacgcgcgccttggctcaagtaaacgcgaaccgatatgatgcggtgctattcgttggcggtcacggtgtgatgtgggatttccccaacaattctgtggtgaacgccgtcggccggaacatctgggagcgcggcggcattgtgccatgggcctgcggcattggtggatatgacgttgtcggatggcagttatctgattgccggcaagcaggtcaccggattcaccaacggcgaagagcaaaatctcgggtgttatccgtggctgcggcgggcgaatagaagggagattgagatagaggcaggggagatgccgggtgcatcgccggcatcacgcctccgtgaaatactcgttttcgtccgcaagccggccgcctttgatgaacaggaatcgctcgcacaactcctgcagctggagatgagcatggcgatgctgcggtcggaagcccactgtctgagcacggcgatgagctggagcacgccgtccgggtcgaggtccacgaacggttcgtcgagaatcaggaactccggatcattgaccagcgcgatgaccaacgcaagacgctgtttcatgctgaacgagaaaccggcgggcctgcggtcacggtacggccaaagtcccacaagttcaagcaccgggcggattgggaggcgcgagcggtgggtcggacgattacagtgtgagccgaatacgttcatgaatcatcgaatcacaaggcgaggcggaccgcaagtattcgagagtcgccagttcggtcgatttcaatgacaatggtgtggacgattacgcggatatcgtggcgggtgcgcgcaaggacgccgaaaaccatccggcttacgattccggctactatcagggcggctatccgccggccgatcgcggggcgtgcaccgtacgtgattcacaacatggcgcagcggcagcgcgaaaacgactacttcgccttcaagaagcacatgacggtcaccgggcactaccgtttcgacgcttcgaaagtgctgtagagcgtactcagggcttggcggtgacggtcggagcggcgtcggcattgccggctttggctccggctgcatcagctgaatcggtgccggccgcactggcgttagcactatcgtcagcgttggcaccgccggctttggccttggcatcagccgcgctcccgccatcgatcaccagtcgcagataatcgcggtcggcggacttgcggcgtggcacgaaacgactgatgatggagtccttcttgccgcggttcttcacgtacaggaaaccgaacacggagaacacgaccgcgccgatgaagttgacgaccagatcctccatcgtgtcgatcagaccgatgtcgaggtagccgccgaggcccaggtcttggccattgaccgtgacctgggtaatgtcgttgatgcgaatcgcatggttggtgtgcgtggggtcgagcatcaccgagctgatggaatgcacgatggcgtccttctgcatgtcgaacccgaacaactggtccatgccgaattcgaagaactcccagatcacgccgatggtcatggagaagcagaaggacacgatcgccagatacaggggcgaaagctcgaacttcacccggtcggaccggttgagcaggtcgaccagcgagaagccgatcgccgcagcgaggaagccgttcatcgtatgcaacaccgtgtcccagaacgggaagatctcatagaacgaactgatctcgccaagaatctcagccgagaacacgaacaccagcacgatgacttccagcaccgaaggcagctcgatgcggaactgcacctggatgaacgccggcgccaacagcagcagcaacgtcaggatgcacaggaacacattttcgtagtcgccgttaaagaactggagtattgccatggcgagcaccagcatgcgcagcaccacatagaccgcgaatgagcttttgtgttcgcggatttccatgcccacggctcggctcatggttttccagcgtacgcgccaggacggtttgcgttgtgcgtcgtgctgttgcgactgtttccgggtcatccttacctctttctcgcattgttctcgcgccagtctatccgaacctgctcacaggcaatcggcaagaacgggcgatagtctggccgcacgaaccgaacggaaaccgatactgtctcgattgtgggccacgcgaatcatccgacaatgctcgatgaggccattacgccggctcctcatggctactggtcgtagggctggcaatcatggccatgccggtagtttgggctatcgtgaggtgtgcgagatgggctttgtgccggctggcagcaaatccaagcagcgaaacaacggaatgaacgaagcgaaaggaacggtatctgatgactccgattgaattgtcaacccgacgccgggttacgggactgacttcggatgagttcgccaggctgttcgtctctttgcagcgtgaagtgaacggcgaagccgcgcattggagcgccacggatgtcgaatcctgggagctggtcggcccgccggtgaccgccgaacagcatctcatcgacacgttcgccgcggccaacgaattcgtggccacgcttgcggaccgcctgtaccacacgattatgccagtcacggaagaatcggtcatcaccgcatacgctgatgacctcacattctgggcatcgcatccggaccttggcggagtgccgtgcgcattatggaacatcgccgcactgcaggcggccgaatgggcccgcaaggaaaccggcatcgcctgtgaactggacgtgcgcgaaccgctggtgtgacagctgagctcaaacatgcgtaggtaacggcatggtttgaggactatggtgttgcgttatcggtcggaaaggatgtgatggtggggcgtcatagcaaaaaagcgcgtggccagtcgaggagatatgcgcgaaagccctccgtttggagcgaaattcgcggctatctgctgacagtgatcgcggtgatgctggtcgtgttgctgggacgtaccttcgtgttcaacgtatatgtgattccatcccgcagcatggaagacacgttgcaaatcggcgaccgcgtatttgcctcgcgattgactccgagactctttacactgcaccgtggcgacatcatcgtgttcaaagatcccgcagactggatggagggggagcagcttcccaccaatctgatgtcgataatcgacagcaatcgttacctaatcaaacgtgtcatcggtctgcccggcgataccgtcgcctgcaagggatccggggagcccatcacggtcaacggcaaacccattgatgaaagcgcttatcttaagtccggcgtgaatccaagcgacagccctttttccgtaaccgttactgacggcaacgtgttcgtgcttggtgataatcgctccaattccagagattctcgataccatcttgacgacggcaacaatgggctagtgccatacgacgatatccaaggtgtggcgttgttccgcttctggccatttacgagaatcggcatactgaactgagtttggcgtgaatccacgagttgatacgtgccgcacggtccggtgcatcctgcagccggaccgttaccggaaccctccccccgaaatctgacgacccccctgtctcacagctatcgtacagctccgatacgggaaacgtgcgggtgattccataacgactacgtacttcaggaagtgacgtgtatcacactatggtcatgtgttcagtcgcgcgcgacccaaagcgtatcgaggtcgtcggcctcggtcgcctttttgcgcttgcgtacccactgttgcaggaaatacgccccatagcaggccacgatgaacacgagctcggccacgagcgcgaaccgttgctccacgtcgaaaatcaccaatacgaacgatgcggtgcacaggatgaacgccgcccaagacacgtacggatagccgggcgtgcggtatttgagttcgctggtggaatggccggactccagccaacggcgacggaacacgatctggcagtaggcgatggcgatccacaccaccacggcggacaggccggaaagcgccaccagcaccaggtacacagtcgaggcggcgatcacggaagacaggagcgccagcaggccaccggccatcgcggcgcacaaggcgagcatcggcacgccgcgacggttcgttttggcgaaccagcgcggaatcatgccttcgttgcccatcgaccacaccatgcgcgtggaggcgtacaggccggaattcgaggcggagagcacggccgtgagcaccacgaaattcatgatgtcgcccgcataggggatgccgatgctgttgaagacgagcacgaacgggctttcgcccacgccggccttgcgccacgggatcagcgcgcacatcacggtgatcgagccgatgaagaacagcaccaggcgccacagcgtggtgtggatggccttcggcacggtggtttccgggtcgcgcgtctcgccggcggtcacgccgatgagctcggtgccggagaacgcgaagttgacggtcagaatcgtggcgaacactggcatgaacccgttggggaagatgccgtccttaacgaggttgccgaacatcggagcatgctggtagccggcaatcggaataacgccgaatatggcgagcaggccgatgacgatgaacgcgcagatagcgaacaccttgatcgaggcgaaccagaattccgcttcggcgaagagccgcaccgacaaggcgtttaaggtgaagatgagaatgatgcacgccgcgctccacacccatgtggggctgtccgggaaccagcgttgcatgagcaggccggcggcggtgaattcggagccgagcgccaccgtccaggtgagccaatactggattgcgatcacgaagccggtgccggggccgatgaacttctcggcatacacatggaaggagccggtcaccggcatggccacggacagttcgccgagcgtgagcatgaccaggtagacgatcagcgcgccgatgctgtatgccaggatcgtgccgatggggcccgcctgctggatggtgtatccggagctcaggaacaggccggtgccgatcacgccgcctaatgagatcatctgcaggtggcgggattccatgccgcgcttcaggttggtatgtagggcgtgctcgtctttgccatcatgtgacgactcggactggctggtttgcgctggttgattcatctgttccgaatggcttcgacggccatccgtctgaatctgcggttcctgttgcgaggacggcgactgtgccgccgtgtcggtgtcgggctgactcatgtttctctctttgccatgcgtgcgttccataggcgtcgtcgtgacggcccggaatagtatacccgcaccgaggatatagctgcgctgcatgatgctgagtcaaaatcagcttcaaggggctgatttggcgtttgccggaggtctacttccgtttcaaggggctggtcaactggcggaacgcagatagaaatggcattgttttatcgctattccgccgtttttaaccagtggctactttggcatcagccccttgaaacggaagtagatgttccgcaaagtcaaaatcagccccttgaaacggagataggcactcgcagcggctacttcaccttctggatacgcagcacgaacacggcagcgcacacggccatgacgatggagatggcgaacgccggcgtgtaggtgccggtcgtggtcttgaccacggaggtgatggtgggaccgactgcttggccgagcgtggtggccaggttgaggatgccgaggcccttaccggcctcttccttgttcggcagcacgtcgacgttgagcgcttggtcgatggctgagtacacgccgtagccgaagccggcgatgcccgcatacaggtacatgcccgtgacgctcggcatgatccacggcatcgcggtgccaatcgcgaacagcagcgaggcgatgatgactggtaccttgtgcgtgtgcatcttgtcggagatcgggccggagatcagcgaagcggtcagggaaacgaccatggtgatgatggacatggtggcgatggtgccggcagcctcggtcttggtctggtgcacgtaatcctcgacgatgtagagttggtacacggagatcatctggtagctgagcaacatgcacactcggcagccgaacgccttgtagaagtcacgcgaggtggagaacttcgggaagtggaaggagacagcgagatccttgagcgtcatcttggtgcgttccatgtcctttgaggattcctcgcgaggtcagatgtcaagcgccacgaatccggaagcccatgatcacggcgccgatgatgaagccggcttgcgcattgttgatcatgcgagagccgatcatggtgccgatgggctggccggtgaccatgccgccgccgtagaaggagtcggtgccgcacagcttaggcatcgcgattatgtgcctcgtgctcatcatccgtatctgtctattgcctctcttcttctcccaaatgcgcgcgacgcagcgtatgcaggtgctccaaccgcaaatccaacgtatccaacgcaagtacgccgcgcgtaaggatccgcgttccaaagaagccatgcaacgtgaaattatggctttgcagcagcggcataacgccaatccgctcggttcatacctgcttcgctgattcaggcgccgattctgtgctcgctgttctacacgctgcaatccctgcccgcaagcgccgccgggaatgcggaaccgttgagcggcatcgaccgcgtcatggcgggcgacatcgaatcatcgtccatattcggcgtgcgcatcgccgactcgttcggcacggtcgtctcgccgcagtcgcacgtcgtcatcggcgtggccgtggcgttgatgtgtctgatgttgttcgcgatgcagtggctgctcatccatcgcaatacgccgaaggacgccatggattcaccgcagttccgcacgcagaagctgaccgcgtttgtgttcccggccatctacgtggtgtcgggcggcaccttgccgttcggcgtgctgctgtactggctgaccaataacctgtggaacttcggccagacgctctgccaactgcgatggtttccggcgcccggatccgaggcggggagcgcaaggccgaacgcgaccatgagcgggagaaccggcaccgcgccgcctccggattgccgtctttggaagaagagcgcgcggcggccgcgcgtgaggaggcccacgtgcgccgcgagcgtgaaaagtcggtcgccagccgcaatcgcagacagcgcaagaacgtgcagctcgccaagcgttgatggcacatgggagaggttacgggggatgcgctgagaccctcgtccccggaacggttcgaagtgctatactgcttgcactacgctgcgatgcctgagtgcaaacggatccaagaccttacgatgacaggatgaacgatgatggccacgaaccgcacattactggaacaggcccgagaattgcaggcgctggcccagaccggactgatgtactgcaaggaccccttcgaccgggagcgctacgagcgtatccgcgcgatggcggtcgacatgctctccacgcaggttgatgcgccggccggacaggtgagtcgactgctcagcgccggatatccgacgccgaaactcgacactcgtgcggccatcttcgatgaagaaggcaggatcctcatgacgcatgagaacagcggggaatggtcactgcccggaggctgggtcgacgagaaccagtccattcggtccaacgccgtcaaggaggtcaaggaggagactgggctcgatgtgaggggcgagcgactcatcgcggtgcaggactgcgccaatcacaacgcgctgacctatccgtacggggtgctcaagttcttcgtattgtgcagccgcgccggcggttggttctcggccaacatcgaaacgacggaaatccgctacttcgaggaagaccggttgccgcggctttcggaaacaagaaacaccgcggaacaaatcgccatgtgttttgcggcccaccgcgatcccgactggatgacgctatttgagtgaaccccgtgaaggcatccgcacatgcgcgttgcgcggcgccgcctggtcatcgtgccgacggcgagcatcggttccgaacactgacgccgaaccgtcgaagccgttcctgtggaaaatccgtgtccaggccatgcagaaccaggtggccatcgtcatgtgcaaccgggtcggcaaggaaggcgatgtgacgttcgccggccaatcggtggtggtggacccgtacggcaacgtcgtcagcaaggccgacgaccaagaacagttgattatcgtcgacatcgatctcacacagaccgcagcagcgcgcaaacagcggccattcctggaactgcgacgacccgaatggtacgactgaaggggcgaatgggtaataagcaatgtcacgattcgccgcacccatcagccgcattcgtgccggcctacagatacatgaccatacgcagattgcagccagctggtgcaaggcgggaatgtgaagtcattgtgcgtttgcttcgcgaagccgcgcaatgccggattcaaagcagctgctcatcattgctatggatgcgggactgaatggtcacttctcttggaccgccggtctcactgggagctagcgcgtcaccgtcgttgttccagaagcgcaatgcgccttgtcgggtctcatcgttgacggatagcaagagatctccctcaaatagtgtgcgtgctgtgcgatgctccgaacgagcatcttgatgttctgcacgaagcatgaggttcctgccccaacgatccggcatgcagtcttgaaagatgcgatgcatcgcattatgctcggccgggaacgttccggggggagaggggcatctctggacagagggatactgcgtttgaagagcgcatataggccgtatcgtatgtgaaatgtgccgattcgatgccgcgcctgatactggtgaataatttcccgacggtgacgtctgtgccgttgaactgcagggtgacgattgcttccatgatgtgttgcgcctcctgctgtactatcgaatacgttttggagtgtcttcgtcggcgcgtaatttgccgatatctgtgttaagagggtccgtcgcttgctgtacgccgtccagcagtccaagcagacgagcaatgcggaggaagttctcaaagctgccattacccgtacgcagcattttggtgaccgttggcatggataatccagcccgctcggccagcaaggctacgggaatgcgctgttgtctgcgcgccaaatcgaggttggcggatatctgacgcatcgcccgactgaccgggattggtgtgcgtgtcggcatattggcacctcctatcccaaatttaaacataaatttgtatggactagccttatgcggaggttacgccaatatacgacaagaacgaaccaacgtcagcccggaatcttttcgacgatggtgttcaaggtgtcgaaagcctcatcgatttggtccactacctgcttgccctggttgaccatttcggtgatctgttctgtgtggggttgcggcagcgcataaatcgacgtcttgacgcgcttcaagaccacgccggcgtcggacagatcctgcttgatggaggcgattttgggaatggacagcgtgccgtcggagaagttcatgccggacagcagctcttcgatattgaagtccaccaacgtgccctgcgcggcactgtcgattttgggcagggcgttggtcgcggcgtcggcggccgcgcccagcatgccgcgcaccgccttcacgtccgaaccgtaatatggcacgtattcggcggcctgccatagcatgccctgggtttcgtctcgcgccgcgacgatgtgactgccagcgctgtccatctgctcaagcgcctgctcgaagtcgccctgcccgacggattgctgtgcttcagccgcatattcgcccgcctgctgcgcctcgccgatcacccgttgtaccgactgccagaacagccagccggaaacgcccgacgccagcagagccgcgaccagtatcgtgagaattacggtgccgatatgtttgcgcttagccataggaccaatgtaccttttgtcccatctagcgccattgtgttctggcctttagtccatcaaagtgtccaacagacttgtcttctctgaagaagcgcatggaaatcagttatagtcgattctctcctgtagctggcgaaaaacagatatagttgaattggactaacgggttttatgtagggatgccgaggaggacaaccatgaatcaggggagggctcgactggaacgaattcggtgatggagggctttgcgaaatccccggtcaatcgatttgctgactggttgggatggggattcgtcttcctcggagcgggtataggagcgtttctgggtgtcgtcgcgtacgttcaacactggattagctgacggcttcgaatagttctccgaccgcttctcggatttgccgggtggcatgaggttttcgaccgctcacgtagtggcggcgacctcacgctaatcagtaatacacactttgatctagcagaccctacggctaaggctaggaggccgacgatgggaaaccgcgtatggaaaggtgaaccttccgccggtggccgggccggaacgatcatcgctttgggcatcgcggcgttggtagtggcgggagtatggttcggatggactcgatactagggctatagtccggtttcgaatctgtcgcagacgttctcgatctcattttccgaggatgcgcgggcaatcgtcagcaaggacgaggaaagctttcatggggacggataccggtacgtgaaggtcgccgctgacccagaacaagtcgacggcaccattctggacggcagggattactccagtggccaactgccccaggagaacatccgcataatcaaggaagcggatgcgaccctgcgattgaacctgggaacacagctcgatgcgctctacgaccggcctcataaggagataaccaacgagggcggcacgctgatcatcatccatgatgccgattcctcggaatggcatttcttcgaatgcctcgtctgaaagctgagcactcccgaaacatatgcgattgtcctgaagaagagcccagaccaaccaggccccgattatccagataaaaagaaacccccagtgcatcacggctgagtcgaagaccgtccggagaggccctttgggggaattcttgatatatcataatgagccatgagccgacagtcaaattcaacaactgatttcctctcacggactccaaggaaaggaagtccgcgggagaaggcgctgcgcgcgtgcattaccgatgaacggcttgccacctacaattatgaggctcaaagacgttcatgcccagcgctagagctgtacctgtgggatcacgacatggccagcgcctgtatgggcgacatcgccatcctcgaggtcgctctgcgcaaccgcatggaccggcaactctccctcctcgctctggagcagaatggcactgaagactggtatatggcagggctacaattcgatgaccgaacccagtaccagattcgtgaagcgtggaaccatctcaccccgcaccagcgaaaaaatcatacgcatggccatctcatagcgtcattgacattcggattttggcgcaatctcttggaagacggcggaacaatccacacgaagtggccagaccagcgccgtgcagattatgagaacgatttatggcgcaaaggactcgataagacattctccaatgggcgccagtatgcccgtgcagtggaagaacgctggacgagaaagtacgcgctggatatcgtaaaaacagtgcatgccctgcgtaatcgggtcgctcaccatgagccgcttgtcaacggcatacctctgccgggtgagaatcgacggattgcattggagaatgcgacgcaggcgtgcttcgctctggcgatgatcctggaccgagacctacacgcatggttgatggataacagcaagatgaaacttgtgctcgaacacgagctgaagcctaatgaataggtagtgagtatcgttttcgccaatcatctcttcagtgggaatggcaatgagctgcagcgacaccaacagattccttaggatccgacaccggcacgtccggcctggtatgcgggttatggcaatgctcgatcgccaccgcgggcgaacccgtgccccacatgacatggaagtccttggatacggccgagatcatcgcgcacatcgcatccagggcgaacggatcattgtccaatacgggcgatacggatcgaccgcgccgcagccccggtcatgtcatcatgtcccatgccgctcatcgtggccacggtcgcagccggataaaacctgctatcatgcgattacttgacacgatgttgcgcttttggccatgcgcaggttgaatgggattgcgccacgaaaggatatgccatgaacgatctgctgattatcgacatgctgcccacgtacgggctgctgttctacctgctgatctcggtattcgtcttcgtgggatgccgtggtctgcgccggaggacctcggatcgtggcctgctgcgttttgccgtaggcgcgttcttggttgtttccgcgctcggcgccgtgttcgctgcgctggtgtatatcatggcagcgcctttggcgcagccggatatggtcgacttctaccgcatgtaccggccaggagctctgatcttcctgctgggattgttcatcatacaatttgtcttcggcgtcgctgccgtgtatcggggaaagtaacctggtatatcctgcgataaacgcattggcagacacttgctgcctatctgtaaacacaccctagataaggcttgcggccgttggtcgagcacagtagtagtgtggtctgctgtgtcaacaggaggagtatgaccaatgcggctgattgagacatggctggcggaccaggaacgcgcgtttgacttgttcgcgaaattcccggcggaagagacgggattcgagaacccagcggccggcatgaatcgtgaacggttcgccgcatatgtgcgagggttgcgtgatgagtcgcttggcgtcggcctgccggacggctgggtgccagccaccaaatacattctcgtcaacgatgagggcgactatgtgggcatcttcaacctgcgtcaccggctcaccgacttcctgcgcaacggtccgggccacatcggctacggtatcgcccgcgaataccgcggccacggctacgcgaccgccgggctcaagctcacgctcgccaaggcccgcgagctcggcatcgaggaggcttacctgagtgtccacaaaaccaatccggcaagtcttgcggtgcagcagcattgcggcgcacgtatcgaccatgaggacaagacggaatactacacacgcatcgccacctgcatggagagcgatggcctctatgcgcgaggcgattgacggcgcctcttgcgtgtaaatggccgattatcaatcggttttaatcgatttcgcctcggtcgatagagtcgccgtcgaggaaccaataatcgtgcggatttccgcgtaacgccatgaacggcgtgagttccacgccctgtgtctcagctctgctcagcagataggcgcggataatccacggatactccagcacgcccgacttgagggtgatgatttgctccactctgctgccgctgacgccaaaatccttgccgccgttcggcggtcagacccagccggctcatgttctcctgaaattcgcggatagtcgccgcgcgttgctcactgttcaaagacatggcttcatggtagcgccggacgcgtgtgggaggtcgggctgctcactggaatacgccgtcagagtagttgatcatttcgagttccgggcccatgtcttcggtttgagtcaggccggtctcatggaagccgatgtgacggtagaaaccttgggcgttggtgttgaatccggcgacccacaaggcgagccgatcgttgccgatggcgcgttggcctgcctcaaccaaagcacggccaacaccatgacgatggcaagattccagcacatatagcgaagccagttccgcagcctcggaccgtttgattggcgaacgtggcgtttgcagaagctcagcaaaaccaatcacgtggttgttctccaaagcgaccaatacgacctgattggggtctttggcgtgactgcgcgtcagtttgagcgcgaattcgggagtgatcgcatccacgattccctgcggaatatgcccctgattgagttcgcgccacgtgcacgactgaacttgggccttttcctcaaaccatggcggctcaatcggaacaatacgaatcgtcatgccgcccatagtaggccggttcgtgagtacagtgtcacttgttgtcatgtgattgcttggcatcaggttgtattgaccgtaatggaggccactggatcagcgtcggaaactcatggaattcgggctattatgatgggagtaagaaaagcacagcacaattgaacataaagacgatctggagcattgcatgagcgtcaatacggcatttgaaaccagtgatttgcccaaagcggagtttatgtttcctgggcctgaacgcgatcgcttggtgaagctcattctggacggcgtaaaaaccgccaccgctgcgctgatgattgaatatgaggaagaggtcgaaccgctgccgtgcgttggcgcgcattcggtgttggtggattccgatgaacgacccgtagccgtactcgtcaccactgcggttgacgtgattccgctcggaaaagtcactgaccggtacgccatcgatgagggtgaaggcgacgtcacggcggcccaatggcggagcgcacacgaatctttctggaattcggcggaataccgcgatgaattcgccaacccaaactttccgttgaacgacaactcgctcatagtattcgagcatttcgaagtcgagcaacggttggagtcgaataacgcattaggttaggcgatagcaaaacttttcttcaggcaactctccgagctccgcaacatctgaaggaatgcccatgtccactagagcgacagaagcggaaagcgtattgaaggagcatatgggatatcttccggtatcggaaatggagcgtcgaggagtttcccgcacggagatttcgcgattcgtgcgtgaagccaagcttgagaaagcggcaaagggcttatatgtttcaccgaatgcggagtccgatccgctgttcgaattgcagtatcgatatccgaaagccattttttcgcatgaaactgcgttgttcttgcttggagagggggagcgagcccccctgacaccgacgattaccttactgcaatcatcaggtacggctcgtctcaagaatgaagacgtaacagtgagaaaggtggccgacaatcgctttacaattggcctggcgtcggctatcactatgttcggacatacggttcgcgtttatgatttggaacgaaccatttgcgatttgttccgctcccgcagcacagtggatccgcaagatttgcaatccgccttccagaattacatgagattcgcgcacactgacttggtcaaactcatgaactacgctcgcgaatttcggctcgtgaacgtgatgcgcccttacctcgaagcggtgatgccggcatggttcaccggcgaattcatcttgtaggcagattcagcatcttgtaggtagctggccttggcgagaggtcattgcaatggcggtattccgatcatcgccattggaatcatctgcctacaagagcacgaaacaccctacaagatgagacgggccagttgggtcagtcccattcatcctgccggttcgcaggccgcaattgtcagtcacaactggtgcatcttcctcatccatgcgaatgatacgaatcgcctttcatcccaatgatttcgctctcatggccgatacccgcatgccgtcatgttccgtaccttggagtcagaagtcgagagtcatggtccgaaaccgaacggagcgggccgaagcagggagcattgaagatgggatttcttaagaacttttccgaaccgtttgcgttcgcgctggcattgtggccgtttgtgtccatgctgctgacggtgccggtgctggcgctgctgtatcaccgcgacaatcgcatccgactgtcgtcggccatagtggcgtatggcacggtgctgtatctgctcggcctgctgtgcttcacactgtatccgatgccggccgatgcggcggcctattgcgccgcgcaccatctgacaccgcagatcaacctactgcagttcatcggtgacatccgtaccgatggtctcaccgccgtactgcaaatcgcgtttaatatcgtgttcttcctgccgttgggcttcatcatgggccgtatctggcgttggccgctgccggttaccgcagtactgtcgttcgccacgtcgctgtttctggagacgatgcagctgaccggcctcatgggcgtgttcccgtgcgcctaccgtctgttcgacgtggacgatctcctgtggaacacgaccggcgcgctgatcgggttcgcgctggccatgttctcgctgcgcctgattccggcgcgggtcgccgatacgacgccgaccaccacacccggcttcatgaggcggctgatcacgttcatcatcgacatgacgctgatcgggttcgccgtgatgccgacgcatctgttcgtcatgatcgtccaatcgaacctgccctcgggctccaacggctcatggcagtcgatggaaccgttcgactggaccggctcgatcctcttcctggcggcgctcatcctcttcgagggcgtggtgccatggttgcgcggcggctgtacgctcggcggcagcttcacgcatatgacagtggaaacccggccgcgagaaggctggcggcgtgcggcgttctatgtggcgcgcatggcgacgctgatcgccgtggtgtggtggcatagcggcggattcaatctgctggtgttcatcggcctcggcatcttctggatggtcaagcatcagatgccgtacgacctgatataagacgtaattcgccgaaaaagtggggctcttggctttcaaggggctgatttcgtccggtggggacatctacttggctttcgaggggctgctcaaacgccaaaccgcaagtataaacggctttgtggcaacgacataacgccatttcagagccttgtctacttgggcatcagccccttgaaacgcaagtagacctccggcgaacgccgaatcagcccctcgaaaccgagttaggcgctctttcgcgtttgagctgccgttcgagggcgtaataggccgcataacagcaggcgacgaacggaatcatgcaatcagggtcgaacgttgcgtctcatcgagcaccacgagcaccagcgcgccgatgcacatcacgatggccagccacggcagcaccgggaaaccgggcgcacggtagtcgagctcatcggcgctgtgcccgtccctcgcccattcacgccggaaacggatatggcacacgcacacggagaaccacaccaccagcgtcgccaaaccggatactgcgaccaacaccaaattgcacggtcgaggcggcgagcacggaagacagcagcgccagcagcgaacccgccatgctgaacagcacggcccacaccggcacaccacggaaattcgtcttggcgaatcgcgcgggaatcagccgctccttggccagcgaccataccatgcgcgaacaccaccacaatgaacacggccgaccacacccaggacggcgaatgaggaaaccatcgctgcatcagcagcccggccgccgtgaactccgatgcgagcgccaccgcccagttcagccaatacaggatagcaatggtgaacgcggtgccggggccgatgaaccgcttcgcatacatgtggaagctgccggcatacggcatggccacggacagttcgcccagcgagaccatcacacagtagacgagcagggagccgaccgcgtaagcgaggatcgcgcccaacggccccgcctgatgaatcgtatagccggagctgacgaacaggccggtaccgattacgccgcccagggagatcatcgtcaggtggcgcgactccattttccgttcgaggccggtatcgtccttgggtgtgccggctgccgccatgctcgggtctcctttggtcgggtgaacagttgtgtctcgtgtcggttgtgcgggcggcgctcgatgcctcctaccatatgatagcggtaacacgaacagcgagtggaacacgaggaatttggaatgacggaactgtatatcggatcgcatctgtcgacggccggcggatggaatgcgctgctggaacgctcccatgaggagggcggcaccgcgttcgcgttcttcccgcgatctccgtacggcaagcgttcgaaggcgctcgacccggccggtgcggcggcgttcggtgcgcgtctgaaggctgagggctatgggccgttggtcgtccacgcgccgtacgtctacaatctggccggcaaggatgaggccaagcgcgcattcgcgatcgaggcgttggccgaggacatcgagctgctgaccgccatccgcgcggccggccaggaggtatatatcaacattcatcccggcgcgcatgtgggccaaggcgccgagaccggctgccggctgattagcgaggggctgaatcaggtgttcgagcgtgcggatggcgtcatggtgcttctggagaccatggccggcaaaggcacggaatgtggccgcaatttcgatgagctcgccacgatcatggatggtgtggagaataaggcgaacgtcggcgtcacgttcgacacctgccatgtgttggatgctggctacgatttggagaacgactacgacggcgtgatgcgccagttggatgaggtgatcggcttggccagggtcaaggcgattcatgtgaacgattcgcagttcggcctcggctcgcataaggaccgtcacgccaacatcggcgaagggcagctcggcatcccgttcttcacgcgactggtcaacgatccgaccatggccaagctcccgatgattctcgaaaccaaggagcagacgccgaccacgcaccgcgacgaaatcgcgctgctgcgcgggctggtggactgaatcacatcggcagttcagcaccaccaccggcagcaacggcacctactggtccacctaccaacggtgacatcgttgtcatgcgaacttcatataccacaattccacaatatgatttcatagttatgacactgtgatacatatatagcaaacaatgattcagtgacgatctctcgtcaaagatgttccgtcaaaacaggcgcatgggctcggtcgaatccaacggctgaatcaggcgtttgccgtcgccctgcagcggggcgacctcgtgaaattgcaagcggcgggataacgcagtgcctgagttccgcacgccggcgagcaaggatgcgccgtcgattgtgcggtccagccacggcgtcccattccaagtcgagcgcgaaacgtctgtacatgcgtgccagtttatgccaatgttctgcctaagccggaatcgcctgcgaaagcccaaaatgtaggacgggttcggcaatcgggacaggacgtgacctagagtggcgcatgaccgaacaccaacaaagggaggaccatgtcggttttggacgaactggtggcgggagcgctggaggatcagcgcacccgtgagctcaccgtatcgcttgaggatgtgaagaaggccgcgctggcggccccggctccgattgacgcgacacgatggcttaagcgcgccgacggcatccccgtgatcgccgagatcaagcgcgcgtctccgtccaagggccacctgtccgacatcccggacccggccgcgctggcccgcgagtacgagaagggcggcgcaagcgccatctccgtgctcaccgaaggccgcaaattcctcggcagccttgacgatttcgacaaggtccgcgccgccgtgcacattccagtgctgcgcaaggacttcatcgtcaccgactaccagatcttcgaggcccgcgcccacggcgccgacctggtgctgctcatcgtcgccgcattggacgacgcccagctcaagcacctgctcgacctggcgcacgagctcggcatgaccgtgctggtggagacgcacacccgcgaagagatcgaacgcgcccgcaaggccggtgccaaggtgatcggcatcaacgcgcgcaacctgaagaacctcaaggtggacgtgaacaaatacaacgaactcgcggccgatctgcccgatgacgtcatcaaggtggcggaatccggcgtattcggcgcggtcgaggtcgaagactacgcccgcgcgggagcggacgcggtactggtcggcgagggcgtggccaccgccgacaatcatgaacttgcagtggaacgactagtaaaggcaggagcacaagtgaaagcatccgaaacgaccccgctcagcgaacatcagggaccgtattggggccagttcggtggccgctatgtgcccgaggccctcatcaccgccctcgacgagcttgagcgcgtgtacacgcaagccaaggccgaccccgaattccacaaggaattcatgacgctccagcagcgttacgtggggcgcccgagcccgctgaccgaagccccgcgcttctccgcacttgtcaaagagaagactggtctcgacgcccgtatcttcctcaagcgcgaggacttgaaccacaccggcgcgcacaagatcaacaacgcgctcggccaggcactgctcgtcaagcgcatgggcaagacccgcgtgatcgccgagaccggcgccggccagcacggcgtggccaccgccaccgtgtgcgccatgctcggcctcaagtgccgcatctacatgggccagatcgacgcccgccgtcaggccctcaacgtggcccgcatgcgtatgctcggcgccgaagtggtcgaggtgacccttggcgacaagatcctgaaggacgccatcaacgaagccctgcgcgactgggtcaccaacgtcaaggacacgcactacctgctcggcaccgtcgcgggcccgcacccgttcccggccatggtgcgcgacttccagaagatcatcggcgaggaggccaagcagcagctccaggactggtacggcatcgaccatccggacgcgatctgcgcctgcgtgggcggcggctccaacgccatcggcgtgatgaacgccttcctggacgacgagcgcgtgaacctctacggctacgaagccggcggcaacggccccgaatccggcaagcacgccatccgcttcgcccccggcaccggccagctcggcatgttccagggcgccaagagctacctgctggaaaccgacgaaggccagacgctcgacacctactcgatttccgcaggcctcgactacgcttccgtgggccccgagcacgcatggctcaaggacatcggccgcgtgaactacagctgggccaccgacgaggaggccatgaacgccttccgcgacctgagccagaccgagggcatcatccccgccatcgaaagctcgcacgccgtggccggcgcgtacaaagccgccgccgatctgaaggccaagggctatgacaaggccgtgatgatcgtgaacatctccggccgaggcgacaaggacatggccaccgccggcaagtggttcggttatctgaccgacgaccaggccgccgcgctcgatgtgaccggcgcccacggcaatactgtcgcctgaacaagaagaggagatttttgattatgaccaacgaagcaaccacgccgtccggccagccgctgggcatcagccacaagcccagcaagtcgggcgctatgttcaccaagttcaaggccgagaacaagcccgccttcatcggctacctgccctacggcttccctaacccggacgtctcgcttgacgccttcaggacgatggtcgagcacggcgtcgacgccgtggaaatcggcctgccgtactccgacccggtcatggacggcccggtcatccaggctgccgcctccatcgccctgaacaacggcgagaccatcaagcgcgtgttcgaggccgtcgaaaccgtggccaacgccggcggcgtgccgctcatcatgagctactggaacctcgtgtaccactacggcgtcgagcgcttcgcccgcgacttcgagaacgccggtggcgccggtctcatcaccccggaccttatcccggacgaggcgggggagtggatcgaagcctccgaccgccacggactcgaccgcatcttcctggtctccccggactcgtccaccgagcgcctcgaaaccgtggcccgcaacgcacgtggcttcgtgtacgcggccgcccgcatgggcgtcaccggcgaacgcgccaccatcgacgcctcgcccgaactcctcgtggaacgtacccgtcaggccggtgccgagaacgtgtgcgtgggcatcggcgtgtccaccgccgaacagggcgccaaggtcggctcctacgcggacggcgtcatcgtcggctccgcgctcgtgcacaccctgctcgcggacgacaacaagaccgcacgcgacccgaaggaaggcttgaagctgctcgccgccaagagcgaggaactggccgaaggcatccacaacgcccggtaaacacccggtgcgcctcacgcgggttgtgccgtgacacggtagggtagtcacagagcgtcaagcacaacccgcgcgtggacacacaccatgagcaccagcaagtagaggcacgatgaatctggcttatattccctcgccgaccttctccaagttcgagatcggcccgttcactatccacatgtacgcgatctgcatcctgatcggcatctgcgtggccgtatggatcctcgccacacgttggaagcggtacggcggcaccttcgaccagattctcgataccacgctcgtcaccgtgccctgcgcactggtgggcgcgcgcctttaccactgcatcaccacgccggccgactacttcccgcccaccggcaacttggtcaacatcctcaaggtgtgggaaggcggcatggccatcttcggcggcatctccgtcggcaccttggtggcgttcctgtggtgccgtcacaagcactatccgttcgcgatcttcgccgatgccatcgcccccgcgctgcccgtggcccaggccatcggccgactcggcaactggttcaaccaagagctctacggctggcccaccacgttgccgtggggcctgaagctcaacgacgcggacgccatcggcaaatccgaaatctgctattctggcgcgcaatgcccggactacaggaccacgctgttccacccgacgttcctgtacgagatgatctggaacctcattggcgccgcgctcatcatctacctcggccacaagcttgccgaccggctcaaggccggccagcagttcgccatgtacctgatgtggtacggcctgggccgcacctggatcgagaacgtgcgcatcaactattccacggtgatcctgggcctgaggaccaacgtgtggaccgcgatcatcgtcttcgtgctcggctgcatcctgttcgtcgtgctctaccagtacgggccggaccccaaggcgcaggcgcgcgggcttgcggcggtcaccgccgacgagctcgaacgccagagcatcgaagaggaacaacttcgccagaaaaagcaaaccaatcgcactaagtgacaccacgataaacagcgccgaaacagcgcgaaacacggggctccaagtcccattgcacagataaggtaggaaaccatgagcaatatcgcaatcgcacccagcatcctgtccgctgacttctgcaacctcgaacgtgatctcaaggccatcgccaacgccgacttggtccacgtcgatgtcatggatcatcatttcgtgccgaacctgaccctgggcgagccgatcgtcggccgcatctgtcaggtcaccgatctgccggtcgacgtgcacctcatgatcgaggacccggatcgttgggctcccgaatacgccaagctcggcgccgcctccgtctccttccacatgggtgccacccacgcccctgtgcgtctggcccgccagctgcgcgagatgggctgcaaggcctgcttcgccgtgcgtccggccgaaccggtcgagccgatcttcgatatcctcgacgagttcgacatggtcctcatcatgaccgttgagcccggcttcggcggccagaagttcctcgacaaccagatgtccaaagtccgccgcctgcgcgatgagatcacccgccgtggcttgaagacccgcatccaagtcgatggcggtgtgagccccaagaccgcgcacatcgtggccgaggccggtgccgacgtgctcgttgccggttccgccgtgtacggcgccgagaatcccgcccaagccatcgacgacatccgcaccaaggccgaggccgcgttcaaggcctgagctccaagcctgaaccgcaatccacctttcattcataaccacaagaaaagaatctgaatcacatgaagacgtttgaatccctgttcgccgaactgtccgaaaaggcccagacccgccccgaaggctccctgaccgtcgacgagctcgacaagggcacccacttcatcggcaagaagatcatcgaagaggccggcgagacctggatggccgccgaatacgagggtgcggaccgcaccgccgaggaaatgagccagctgctctaccacgtccaggtcatgatgatcaagcacggcctgacgcttgaggacgtctacaagcacctgtgagaggaacgcaaatgctgagaatcgcagtgcccaacaagggcatgctatccgaacccgcgtggaacatgctggccgaggccggctaccgtctgcgcaccaaccctcgccagctggtcgtgcaagatcccgacaatggcatcgagctgttctacctgcgtccactcgatatcgccgtatacgtgggccgcggcgccatcgacgtcggcatcaccggccaggatctgctcaagaactccggtaccgccgcgctcgagcacatgccgctcggctttggtacttcgaccttccgtttcgccgcaccgaacgaatccccgatcaccactctggaggatattcagggcaagcgcgtggccaccacattcgataagcttgtacacgactatctggtcgagcacggcatccaggccgagaccatccatctggacggtgcggtcgaatcctccgtgcagctgggcgtggccgacctcatcgcagacgtggtctccaccggtaccaccctgcgcaacgccggcctgcgcgtgtttgccgaaccgctcatgcactccgaagcctgcctgattcgttcgccgcgtctgaacgagcaggactcacgtctggccgtgctgacccgccgtctgcaaggcgtgctcactgcacatcagtatgtgctgatggactatgacattccgatcagcaaggtcgctgccgccgtggctgtgacccctggctttgaaagcccgacgatctccccgctgcacgacaaacagtggaacgccgtgcgagtcatggttcccaaggccaaggtcaaccagctgatggatgatttgtacgaagtcggcgcacgcggcatcatcgttaccgctctacaagcctcccgcatgtagactgttagtcgatatgaccaaccagaaagtcaacaccagatacagtccggaagcacgtgacatctatttcactgtgcccaatttgatcagcgcgctgcgaatcatctcgattcctttcatcagcgtgctgatctccaagcacgagatgattgcggcgctagccctgatcgccatttcctcggcttcagacggacttgacggcatcatcgcgcgcagattcaaccaagtgagcaagatcggtcagattcttgatccgatcgccgaccgactgctcattttctgctcgattctggctctcagcgtcgccggcatcatcccatggtggatgctgattatcgtgggactgagggatctgtggatggcgattcaggtgctatggcttgcccagtacggttatggtccgctgcccgtgcatttcgtgggcaaggccggtaccgcgctgctgatgatttccatcgtcagtctgattttcgccgatttgggcaccagtacgttcttccacttgctctacatcgccgcgctggccgccggcatctggggcatcgccatgtattggctcgccggatatatctataccaagcagggcatcagattgctacgcaaggaactgggggagaagtatggcgcttgaggccacggccccggtctcattccccgtacccaaggagaatgagccggtacgacgccgcgccgtgttctcccactcagtccgaggcgcggaatcacatcatgcgctttccccggatgacgccgccgccatccgcaccagacgtcgccgtaaaaccaacgacgattcgcttcagctcatcgatgatcttgtcaatcgtccgatggatccgatgttctccgactcacgactggtccatgagcatcgttcgaccttctccatctggtttaatcgcatcgtcgtattcatcatctgcgtcggcgttggctttgcctgcagcctattcgtgcaacagttgcaatccgatccgcgtaagcaggtacggcagactttggccacgcaattggagaatcgcaactcgcaaatagacgaactcaccacggacgtcaataatttgcgctcccaagttgacgaacagtccaagaaaatatccggcagcgtgaaaagcgatacgcttatccaagacgaaatggtcaatggtgccacggtggtcgaaggcgaaggaatcaccatgacgctggccgatccaatcgcggcaagccagtcggatcaatcctcctcgacgagagtcggcacctccacgaacatccgagtcatcaccgatctggatctgcagcaactggtctccctgatgttccaaaacggagccgaagccattgccatcaacggtaataggctcggcgcgcaaacctcgatacgcaaggccggcgggcatattctcatcggcatgaccgcgatacaaagcccctataccattgaagccataggcgataagagcgccttggccgaagcgatggggaagaagaaacttgcaagtctttacgattccttcaaggaagccggtatctacccgcaggtgagcaaatccaattcgattacacttgaggcagcagtcactggcgaagtgaagtacgcggaaaggaatgaataatggcagccgttctgggactaatcatcggcgtcgtcatcggcgtgttcgtcaagccggacattccgatcatcgtgcagccttatctgccgattatggtggtcgctgctcttgacgccctgctgggtgccgcgcgagcctatttcgagcgcagcttctccgaccgcgtgtttgtgatctccttcctcgccaacgtggtgacggcaacactgctcgtgttcctcggcaaccagctcggcgtcggttcgcagctgcagacagccgtcatcgtcgtactcggcatccgcatcttctccaacgtgtccgcgatcagacgcttcatcttccgaggctgacaagggtactgacgtatggcacgtaaagcacaatcagacaacatgctggagaaaatgcgcgaccagcatgcacaagacaaggtcaacgaccggatggaaaccgggtcgtttcccacggtgcgtaagaagccccggaaggatctcaaccgtgccagcaacaaatcacggttactatcctcgattctcatcgctctgatgtgcgcgttgttgggtttcgcctacatgagccagatcaataacactaaatccacgtacgaaacgatggacgagagtgaactggtaaggctgctgaacgagtcgaatacgcaaatctccaatctcgagcagcgtaaaacccagttgaacagccagctcaactcgctgaaatcggcggctaacgagcaggagcaggcgcgtaagatcgccaagcaaaacgaggagaccagcggcttgatctccggcagactcccggcaaagggtcaaggcgtgaccatccgaatcggacgaggcttgacgactaaagtggacgcctcaatcatgttcaaccttatcgaggaacttcgcaatgccggtgccgaggtaatcgccatcaataacgtgcgcgtcatcacctccacctacattcaggacgccgaggaaggtttgatcgtggatggcaccaccatcaagcccacatacacggtgaaggccattggcaatccgcaggaactgtccaacgcagtcgatatcgccggcggtgtgggcgctcagctccaggtgaaatacgggtccaacgtcaatgtacagccttctgacagcatcattatcgacgaagtacgcgaagctacgcaaaaccagtatgcaaagacggtagaataggggattatgaccaacccgattcctagcgcaggcgaaaccaccattatcggcctgcccgcgattaatgtactgcccattaccaccaccggcgatcgaccgctgactcaagaggatctggacaccatcaccagattgtccgagggaacggcattgctgatttccgccaggggagcggtctcaggttctcgttacttgcttgacgaggatgaaatcaccgtcggccgtgatccgcgagctgatattctgctcgacgactccaccgtatcccgtcagcatgccgtgttccgcagggtcaacggtcagttctttgtggttgacgcaggaagtctgaacggcacctacgtgaaccgtcagcgtgttgatcaggcgacgctgaagaacggcgacgaaatcatgatcggtaaattccgcctcgtgttcttcacgaaatctgccattatttcccaatagtccacacccagcacggggttagactgattgcagaaattgcaatcatgtgattacaccagtgtgagtcatatgcgagacacgcatgagttaggggagtgccatgggacagaccgggctgcatcttcatgtttcgcttgaggaccgtcagaatctgaacgctgacgcgattcagggggagttgttctccaacgtcgatactgaggagatcaagcgcggctaccgtggcactgtggcctccaaggtggccggcatcacgtaccgacagctcgattattgggcacgcaagcagattgttgagccgtccatcacgccgtctcatggctccggttcacgacgactatactcgtttaaggatgtggtgattctcgctgtatccaagaagttgcttgatgccggtgtgaatctgcagaacgtaacggcggccatcggattcttgactcaacgcagcaccgatcagctggccaatgtgaccatcatgtgcgatggtcaaaacgtacatgaatgcacaaccagcgaacagatgctcgaactgttgcaaagcggtaaggcagtgttcgccgtgtcggtgggttcgttgtggcaccagattgagacggccttggaacaggaagaatatgttgatcttgaggccaagccgctgacgattgccacgggccgtccgattgatgaactgactgccatgaggatgcgcaagaagctcgaggcacagcgcttgaaacgcgcaaccgcctgatacatgtatggttgttggcgacttgccggctttggtcggcaggtcgctttgttgtatgtgttgctccatcttatgttttttatatgttgcggtgattattatgactgattggaggaccgggtgaacgggattgttgtcggattgttgccgggcgttctgtggatggtcgccgtcatctttgctgtgtccatcatcactataacggtcagccgaggtcatctgttcacgccgaaacgccggcgaccgccggtcgatccggtcgactggtcgatggtgaaaacgcatttcatgtcgtttgcggcggcgctgatcccgtttcccgtgttgacgtttacagcggatctgatgaatgctcgcatgctcgcgttctacgaccacgcgcaattgcccggagcaatcatcatattcgcgctggtgctgctggaactcatcgccatgtatctgcaggcacgcaacgcttcggaaaccgaaatggacaagcgtttgggcgttgcttctcaccggaataaggatgatgttgcgaagtagccgattctctgcggcgaggctaatccgcaactagatactactggttcggctaaaatcaccacgtactattagccgataatgtacgttatgtcagattagttatccttgacaaggattcggtcgcctgtatcaactagtccacgcataccaaggccgacagccaaaggagcaccggagcataccaggccgacagccaaaggagcaccggagcgaccaccgcaattgcaagaatcgccgtgcctttcagccaatccttgtcatctcgtttccagtggaatgctcgccaaatgaaccatatcagcatgggaatctcatacagcgacagcaatggcaaaccgatgaaaaccaggtcgaagcccgcggcgcaggctccatcgcatcccatcatgaagaagtcctcgccgttgtgtttcagtgtgtttggaaataacggtttacggcttcttcgatctgctcgggcttctcgatgatttcgtaggcaccgtgttcttccatctcaccggccggagcgtagccccagcggcagccaatggcgtccagattgcaggcgtgggcgccgtcgatgtcggtgtagcggtcgccgatcatcacggccttgtcccccgctgcagcatcaaaaccgattttgtcgaagcagtaccgaatcacctgatccttgtccaaacgagagttatccctggatgcgccatagatgccgtccaacagctcggtcagatggaaatgctcacagatcggaacgcattggtactcgggcttgcagctggccaacgccagataatagccgtcggcacgcagcttgagcagctgttcgcggataccgggaaacacgacgttcaccaagcggccgggaactttgttgccgggctcgttcggatcatcgaacacggcgcgatccgcatagtagctgcggtagatggtgaccgcccggtcaagctcatcctccggcacatggttgcgtcgcagcgattcgatgatggccggaccaatgaaacgatgcagctcggcatcgtcgggaaccgggcgacccaattcctcgaacgtcttgacgacggaggcgatgatgccgccgtcggacttggtaagcgtgccgtcgaggtccaacaggaccactttcatcggatgctgtgccattgagattccactcccctttgttcatgtcgactgctttgaatggtcgtcaaacgatatgcgacttgttccaacaatgattatgcccagtcgggatgactgggcatcaagttcacgtgttgttcagtaggagatcactcgtagtcaggaatccaaccgtcacggtgcatttgcaggcgcttttcgagtagggtggccagttcctcttcgctacggcgttccagcagcatgtcccagtgggtgcgggtgggtttgctgatctcgtcgccctcacggtcggcgtcgccctcacggtgggccacggaaccacaacggcactcccactcgtccgggatttcggcaccctcggcaaacggcaggatggtgcggtggcccttcgggcatacatacgccacatcgtttcgtgcggcgaaatcgacgttgtcgtcggactccagcgatttcgctccgatgctcatgcccctgaggctacgttctgccatatcggcatcctccttgaaagatctttaaccctactaatttacgcaacagttcggacttggccgctattccaagcttccgacgtcggctgacaaactcccatcaaacggccccccgtcagtccacgccggagtaggccaccacgccacgattgacccggtcggccgcttcgtgggcgaggcctgccagccgctctcccccgtcgaacggcagcggctgggcgacagcgatctgctgcagcacgtcagccagtcgtttggcagtgcgcacgaagtcgccgccggtcatgtcggtgccgtacaggcacgatcccagcgaaccgccatccgcccattcatacatgatgtcgagaatgccgaagtccggccgctgcatctcgtccagaccgtgatcctcgcacaggatatcgatgtcttcacagatgcccttgagcttggacgaagcgattgcgatggacccggagatgccgcccgggtagtgcctcggttcgccgtctcccccgcgtctggcctcgtataccagtgaagagagcacagcggccagtccgttggcgtcgagcttgtcgaacgtgccggcgagcagcgcctcgcacagttccaggtcatgttcactgtagatgcggcgcagcagcgagcctttttcggtcaacgtcatgtcaatgtggccggccgcattgacatgacgttcgaggtaaccaagcccggtgagaatatcgcagatgcgatcgaactgacgggccacggacccggtacgggagtcgtagcgatcggtgacgcgctgcagttcgcgggtctcgcgggcccagcggtggccccacttgaggtgttgctggaggtccgggcagttgcggcatggatgctcgtgctccgccttgcgcaaatcgcgaatgcgctggtcaaggttctggaaggcgcgtgaacgctcctgatcggtcaggaacacttcgtgcttcagtttgcggcggccttccttttcgatgtcgctcagctccatacgcagggtcatgaactgtttgaagtcgccgtgttcgcatgcgaacgcctgttcgtatccggccagcgcgttcttcagtgtgttgatctgcgattccagctgccaggccgattcgttggcctcccactgggcaaacgactggtccagggtaacgtgcgcggtctcgtagtcgctggagttgagcaggttcacggccatgttgaacgtgggtcggaagctcgagtgcagcgggtagacacgcttggatgacagcgcggcggccgtggcgggcacaaaaccgtgatggtcaaccacgatggcgtggccgatggtgtcgatgccgcgccgaccggcacgaccggtgagctgcgtgaattcgccgggcgtcaggcccacatgaccggtaccgtcgaacttctcgagtttctctaccaccacgcagcgggccggcatattgatgcccaaggccagtgtttccgtggcgaacaccattttgaccagaccttcttcgaacaatcgttcgactatctggcggaacagggcaatcatgccggcatgatgcgaagcgaagccttcttccaacgcaaagcggaacttggagaactgcagggctttcaggtcttcctgagtgagttgcccctccaccatctcatccacgatgcggcgaatcttggtcacttcctcatcggtggtgagctccagtccagcgttgatacactgttccacggcctggtcacaaccgttgcgcgagaagatgaagtagatgccgggcaacattcccagaaagttaagctcgtccaccacggcccagcggcgcggggtgtggcgttccgctttcggggcatggcccttggcgcctttgccgccgcggcctctgccgaagcccttgcgcttatcggggcgttcctcgccgcgccggcgtgcggccttgcggtccaactggtcgagccggttgatgagttcggcgttgagcttggtggtctgctcgccgttgccgtcgcggcgatagagatccagcacctcaggctcggtgtgttcgtccgcctgcacgatgacgtgctgttccaaaggcacggggcggtgttcgctgatcaccagtttggtgtcgcctcgcaccgaggcaatccagttggagaaatcctccacgttggacacggtggcggacaggccgacgatcttgaccgtcttgggcaggtggatgatgacttcctcccacacgggcccgcggaaccggtcggccagatagtgcacttcgtcgagaatcacgtagcgcagtgcgttcagcgtggtggaacgctcgtagagcatgttgcgcagcacttcggtggtcatgaccacgatgtccgcctcggagttgatcgaggtgtcgccagtgagcaggcctaccttgtccgggccgtacacgtcgaccagatcatggtatttctgattgctcagcgccttgatcggtgtggtatagaaggctttgacgttgcgttcctgagcgagataaatggcaaaatccgccacgacggttttgccggcaccggttggggccgcgaccagtacgttgctgccggcttcgagcgcgtcattggcttcggtctggaaatcgtccagttcgaaaggcagggattcggcgaatcgcgctgctgcggacgcccgatggcgctggactttttggaatgatgcgtaccgctgcgaagggctcagcgtctgggaatcggcattacccttatggtgttggtgacgtgccattgctgctttccgttagttgttgaatcgcttccagcgggcccatgcctgggtgtggcgctcgcgcttggcggccttgctgcgaatcacgtccgcatgggcctcggcataacgattctgtgccacgctgaacggctgagtgaacagaggcggctcgctggtgtcggcagaagtgccgggctcccccatcgcggccacacgttcaccgagttggccgccgatgtcggacatgtctttcaaggcacggagtccatgaagggctgcatagatgagtccggcaacaatcatggccagcatgaacagggccagaatcagccatatccaccaaggcatgaagggctccttacttgttctcgctgatgctcagttcgcgttcggcgcgtgccacgatcatggtgcgcaacgtttccggggcgaccgccgtgatatgacgcgcgtgggcaatacagaaggccacgaaccaggaatcggaggaaacggtcagatgcaccttttcaccggcaccgcattgttcgacggtagcgcccggcaatgtcttgatgaatgccagatcgcgctgatcggtgatgaacaccgcgtcggtaccgttgtcgaaactccacttgcgcagttcgctcaccggcatgttcgggatgttgatctgcttggtgggcttgaccagttccgccttttcgatacgggccaagcgcagcacctgccagatgcgcggcttgccgttcgccttgtcgatggtcttgtctttggagacgtaggccttcttgtccttgggggcggcggaaccgacatccgtgtagacggcggcataatacacgccttcgtcgatgaaaatcttggcgggggccaccagcttgcgacgggtactaccggtaccgtcggagtactccatgtccaacagcgaatcggtgttgatcgcgcgcttgacgatggagaagcttcggggctccagctcatagccggtcaggctcagccacggggtctgtcccgggctgacatggcggcgcaaacgctcatacagggattcggcctgcccacgctgcttgtccggcagtaacggcgaatgcgccaagtagctgaccgaggcggtgagcatgctgaggtattgcggcgaaatgccggcaagacgttcaaggcccaacgaattggtggcggaaacaataccctcggcatccagcagcggccagtcgatatcgaagaactggctgccagccatctcaccatcgtcggaaacggtggtcagggtgttgatgtccttatgaatgatgttgacgaatttcttgagctcgtcgtcgttcttcggtttgccgataaagcgctcggccagctcgctcatcgagaattcctcacccaggtgagcggagaggaacagcatcagacgcaggcgacgatccacctcgctgcccgtttggaaagcggatccgttcttcttgttctgggccttgatcgactcgggatcacccggctcacgaacatcgcgactaatcgacggggaaaccaccgaggcgcttacagggctggcggattcgtcagccagagtgaatcggctggcggcgtgcaggcggcgatgataggcgtccacagcctcctgcgggctgacaatcgtggcacccggatgctccagcacaaacatggccaaatcgtcggaatcggtgtaggccacgttcaggtgttcgccgtccacatcaacggtggcggcaaagcgacgcgaatcgataaccttgaccagcgagtccggaatgggctgcgtgcccaagccaggcgcaatcgaatccaaaccgagaccgggaataggggtctgcggcacacgcggcgtggtgcgcgacgcatgttgggcgagctgggactgatccggctcggaggaaatcgacatcgaacgagccagatagttggcggcggcaagcaccggcatatcttccggctcgaacatcagacggatgcgcggttcgtcgcccaactgcagacggtaggacgcgaagtcctggccttccgacttggacgaatactcaggctgccgtgattcgatggcgatgcccatagcggcgagcttggcgcgatcacgctggaactgcttggcgaacgcggccttggcagcctgatctgccagctctccatacgagtcggcgtaagccttgacgcgctgcgcaatttggcgggatgtgagccattgcgggaacgcggatgacaacacagccagtacgtccagctcgtgcttgccccatttgtcggaaaaacgccgacgtccgcttgtgccctctgccattagtcctcacgtatagttattgtttcattataagtgcgtatgagtttcctcacactcactctatcttagaggctttttccgcacttgagcgccatttcacaaaaataatatcttttttatcgttcgaccgtgttgtaaatcacacccaatcgtccggttcgatgccttgcggaccaacgtattcgccgttcggcacatagcttggctcgcccttatcttccagtttggcgtcggcgaacatcatgacgtcacgtccgaatgtccagtcgccctgaatggaaaccgagttggctgcggccaaagatggcacggcgtaggggaaccgttcgtcgaaatcgtggatgttcttgtagtatcgcggatcaagttcgacgttcgggaagatgtaattgccgtcttccatctcatacgtgtccgtcaggtggaatcgatcggaacgcataatgaacaaatcattggtggttttcaccggaaggaagcgcatacgatccacttggacgcagatagaaccgttgaacagaccgattgcggcgcccatggcggtttccagctgaatcacctgttcggaatccgggtccgtgggattcacggtctttttgttacgaatcaccggcaacggcaacacaccatcgcattcggcgagcttgtctttcaaagcgtcgatgcgaacccagatcgagttggtgttgaagtaaggatgcttggtgatgtcttgggccgcttccttatcgtccggatggacctggctcatttcacgcagtattaggcgaccagtagccttgtctcgcacaatatggccgcccttgcgatcggccttggtgcggatggccacttcagccataaacggggcacctgtgttttcgaagtgctgggccaacgtacgcgaggggcgcgcaccgagattgtcggaattggagatgaacagatacttgaagccgcgctcctccaatacgtcaagcagaccagactcccagatggtggagaacaggtcgccgtggccgggcgggcaccattccagctccgggttcgcagggtagctcacaggttcgccggtggcggccacgagcttgggttcctgatgctggatgatttccatcggcacgtcatgctgactgaacttgcgatgatgcttgagcaccttcatcgtgtccgccgaagtgtggaaggagttcatgaacgtcagcggcagttcgacgttcaggcgtgtgcgagcggtaagcacctgaccgatgatgatgtcgatgaagcgcatctgcttggccttgtgcctacgcaccggcaacagcgatttggccttgtctaatcccatggaggtgcccagaccgccattgagcttgaggaatgcggtcttggcgaaggcgtccacggccttgtcgtggttgatggtctcatagacgtcgtggaagctgggcacgtggccaagcggctcgatgtcgtcctcgcgaatccagctggaggcttcttcatggcgccatacgtcatacaaatggtggaactggttgatggcggtttcgctcatgccatgctcgcgcatcttggcggccgaaagctcgaaagtctcatccacttcgggggtgtttacggtttcttcgggggtgtccgaggtaacggcgtcggtgtcgtcagcggcggcgatatccagttgggccttatcgtttatttctgtcaattcgggtccctttcgtcaaatcaataggaaccagtctagcccctgtttggggcaaacgcatacgacgggggtgcggaggcggtgaattgtcggtgataattcattacgaatggcttacaaaggtaagtccgtcgtcatgttgtctcatattgtctgaaaacggaaaaaccccggaagacaaccactcaaaagtggcggaattccggggctaatcggtcgggccggcgggatttgaacccgcgaccccttgacccccagtcaagtgcgctaccaaactgcgctacggcccgatggtgcaaaagcaccgagtagataatttaccagatatttgaaatctggcaaattacgcgcgtgtcacttccgcttcttcttctcgcggatgttcacggagatctgaatcggcgtgccttcgaagccgaattcctcgcgcagggaacgctcgatgtagcggcggtagccgtgctcgaggaagccggtggcgaagatcacgaaacgcggcgggcgcgtggatgcctgcgtggcgaagaggattcgcggctgcttgccaccacgcaacgggtgcgggtgggcggcctgaattttgccgaggaaggcgttgagcttgcctgtaggaatacgctgatcccaggattccaaggccttatccatggctcgcgtcagacggttggtgtgccagccggtcttggcggacagattcacacgctcggcccacatcacacggtcgaattcggtgttccacaggcgttcgagacgctgcttgtcgaactcgtccatcgcatcccacttattgaacacgagcacgattgcacggcccgcatccacggctgtggacatgaccttcaaatcctgatcggataccggctgcgaagcatcaaacaggatcagcgccaattcacagcgctcgatggcggcctgcgtgcgcagagaggaataatattccgcgcctgtgagcttgtgctggcgtcgcttgatgccggccgtgtcgatgaacagccagtcctcgccatcgatgttgacgatttcgtcgacggggtcgcgcgtagtgccggccaaatcgttgaccacggcacgttcttcgcgcgccagctgattgagcagagacgacttgcccacgttcgggcggcccaccagagccacgcggcgcaggccggaaggcgtgaggtagccggaagtcttctcggcctgcttgagcttgtcgagcgcgacgtccagcaggtcgcccactcccctgccgtgcatggcggaaatcgagtatggttcgccgaggccgagcttccagaattcggcggcaagatattcgctggcctggtcgtcgatcttgttgacggccagcacgaccggcttgccggcggcacgcagcatcttgacgatgcgctcatcggtggtggtcatgcccacttgaccatcgacaacgaataccacagcatcggccaaggtcacggcaacctgtgcctgtgaggcgatggcggattcaatgccttccacgtcggcttcccagccgcccgtgtccaccagcttgaagtcagtgccggcccattccgcgtcatagctcacacggtctcgcgtaacgcccggcgtgtcttccacaacggcggcacggcggccgaggatacggttgaccagggatgatttgcccacgttcggacggcctacaacagccagcacgcccaccggcttggggccagccttgcgcgcgccttccgtgaaaccgcggccggaaatcagatcctcatcgccttcgtccagctcatagccttcgagattggcggcatactgctcgtattcctggttctcgatggcgtcctcgaccagaccgatgagcagatcgagcgtgtgggcgaagtccaaatcggaattgtcgatggtggtaacgccatcggcggcggtcaggaagctggtgaccttggaatcggccttgtcgcgcgcggccacatcctcagcacccacgcccttgacggcttggccggtgcgacgggcctgacggacctcctcacgggcggtcagcagcacgcgcacctcggcgtccggggacaccacggtggtgatatcgcggccctcggccacgatgcccaaacccccggagaaggagtcggccgacgcctcgcgggcgatgtaggcgcgctgggcggcgatgagcacgttgcgcaccgggatgacgttcgacaccttggagacatggctggagacttcggaggaacgaatggcctcggagatgtcctcgtcgtcggcgaatacgcgggggttgtccgggtccacggagatatcgaaatggtcgccggtgaagaactcgcccaccgcttcggtgatgacacgctcatccacggtttcggcgtccagatcgatgtcctgcttcagacaccaccaagcgcaggcacgatacatcgcgcccgtgtcaaggtaagcgtatccgaaatacttggccagcgccttggacgtggacgacttgcccacgccggcggggccgtcgatggcaacgcgaatcacagaccaacctccttggacagcgaacggacttccgtctgggacagcacgcggtaggaaccgggcttcaaatcaccgagcttgatcgggccgatctgggtgcgcaccaagcgcttgaccgggaagccgattgagccgaagatacgtcgcacgatgcggttcttgccggagtgcagcacgaccttgaccatcgtgtggtcacgcgaggagtcgatgatcgcgcagtggtcgagcttgatccagccgtcgtcgagctgcacgccggtggtcacgagtcgacggcacacggtgccggagatcttgccttccagcgtggcgacgtaggtcttctcgacctcgtacttggggtgcatgacgtgctgcgagagctcgccgtcgttcgtcatgaggatcagaccctcggaatcgtagtcgagacggcccatgtggaagatgcgctcgtacttgtcgcccacgatgtcgcgcaacgtgtagcggcctttcgggtcgtccatggcggagagcaccttgcggggcttgttcagcgccagagtgacgtggttcggattgacgcgtacgcgcgaaccgtctacgcgcacctgctgcttatgagggtcaacgcgagttccgagctcggtgaccagttcaccgtcgacctcgacacggccttcggtgatcatgtcctcgcacttgcggcgggacccgaatcccgcttgggcaagcagcttctggagtcgaatggaattggaatcgtcttgcgctttcgcagcgcgggaatatgcgtttggcatcgttctcccaacgtggccggacagattctgtcatcgcagagactgtcgatttgtatacatacttcagagttggcggactggaatcccagccaattccgacctatatatcataccgcaacgtaggactgctgctagactggcaaccgtttgtgcgggttcgcccgtcttccaacagatgaaaaggaatgaacaatcatggaagaaaccaagcaacagccgctggctctgcgcgtgtgcgccgaattggccggcagcttcctgctgtgctttgccatttacgccttctccacatggggttcggccgtgtatggcatcaatatcgtgttcttcgcgttggctaccggcttggcatatgccgcagtcaccgccatcttctcccgcgtgtccggtggccagctgaatccggccatcaccgtagcctccgtgctggtttccaagacgaaaatcctggatggcatcctctatgtgatcgctcaggtcatcggtgccatcgccgccggcttcgccgtggtcaagctgctgcccacatccgagcaggtagctgccaaagtgtggctgactccggccgttaacggtttcgaaaacggctccgtgtcttactcgctgctgacccagtatggcattacgttctcgattacgctggcgattgtcgtcgaggtcgttgcctctctgattgtcgttgccaccgccatgtcttctctgggtgatcacggcgagtcctcggaacgtcatgtcattgccatgggtcttgcctatggtctggccaccgccatcagctacccggttaccggtgctggtctcaatcccgcccgttccaccggtatcgcactggccgcgatgaatgagggtcttacgcaaaatccgctgcagcagctgtgggtattctggattagcccggtcttggccgccgctgtggtggcgttggtcatgatcatcgcgcagatgatgaccactcccaaagtgccggctgccgccgatcttccgcagacggatgccgatgcaaacgcggacacgctcgacgatggcgaattcttcgatcaggccgcctcgtctgatggcgattcagcggaaaaagatgttgccgaagagtccaaagaagctgaagtaggtaatcagcaggccgattcccaaggcgatgccgatgaaggagtcgaacgccactgagcgcactttccatgggcttttgtcctgaagaatcaggcgaacaagcccggtgatgatggccgtcacggcaagtatgaccgtggcggccatcgtatatccgaaagcaaccagcagtgtgatgacggcgacgacgccgagtacgcaccattcaaaccatggcttgccctcatgtgcttcggatacatagggatggttgtgcatgttgcgattccttctgtcgaacggttacgtgaccacaatagcaggcgaatagcaaaaggtgggattccgcttggacccgtcaacgggtcaagcggaatcccacctttgtgcgttttggctgagcttctcccctcagagagtcccgatcagtggaagaagtggcgggtgccggtgaggtacatggtcacgccggccttcttggccgcttcgatgacctcctcatcgcggatggagccgccaggctgcacgatggccttgacgcccgcgtcgataagcacctgggcaccatcggcgaacgggaagaacgcatcggatgccgcgaccgcaccggtggcgcgatcggcaccatcggccagcgtattggcgcgctcgacggccaaatggcaggagtccacgcggttgacttggcccatgccgatgccaaccgtggcctggtcgtgggccagcaggatggcgttggacttcacgcagcggattgcacgccatgcgaacacgaggtccttcagcgtgtcagcgtcggcggcctcgccggccacgagcttccaggcgtccggatcgtcgccgacggcgttgatcagatcagtgtcctgcacaagcaggccgccatcgatctggcggatggcctcgtggcccttcggcggctcggccaccttgaggatgcgcaggttcttcttcttggtctgcagcagttcgagcgcggccggctcatagtcgggggcgacgatgacttcggtgaaaatcgggcgcacgctttcggccatctcaagagtgaccttggagttgcaggcgatcacaccgccgtaggcgctcatcgggtcgcaggcgtgagccttcttgtgggcctcggccgcggtcgcgccgatggccagaccgcacggattgttgtgcttgactacggccacggcaatggcgggagccatatcccatacggtgcgccaggcggcgtccgcatccacgtagttgttgtagctcatcggcttgccgccgagctgctcggcgtgggcgaaaccggtctggttgagcgggtcgatgtagagggcggcctgctggtgggagttctcgccgtagcgcagggtgtgcgcacgatcccaggtgcgggtgaactgggccgggaacttggcggaatcgacttcagtgccctgatcgtccttgtccacctcgacggcgtccagagaggccggcttgggccagtgcttggcggtccactcgttgatggtggcgtcataggcggcggtgtgcgcgaaggccttggcggcaagccacttgcgctcgtccaaggagaagccggtgccgtcggccacgcgggaggcgaccagtgcataatcggccggatcggtgacgatggccacggtggcgtggttcttggccgcgccgcgcaccatggagggaccgccgatgtcgatcttctcgatggtatcggcctcgttggcgccggagcgcacggtgtcggcgaacgggtacaggttgacgaccaccaggtcgaacggcttgatgccgaactcctcgagctgcttggcgtgctcggggttggtcatatcagccagaatgccggcgtgaatgtacgggtgcagcgtcttgacgcggccgtcgaggcattcggggaatccggtgacatcggacacctcggttaccttgacgcccagttcggcaagcttcttggcggtcgaaccagtggaaacaacttcggtgccggccttcacgaacgcttccgcgagtacttcgatgccttccttatgaaagaccgagaccagtgctcgacgtatcggtcggttcgtgtttgtcatcctgttcctccttggattcttgtggttgtgacgctaggaaccgcgcctgacgaacggtggcggtcttcgaggtcgcggcggtggtgcgggaatccttgattctctcaaccaaccagactatcggaaaaacgagcgctgtgccaatcagcgcgagcagccatgccgcggtaagtcccagtgcggtcgaatgaccgacgactctggtggaggccatgacgtcgacgcctatatgagcgagacgatgattgccaagcgatccattggacagagcgaacagcaatgtggatgccagtgagatcagcatcgcgctcaggcagaatgccccggcggagtagatcagcgaaaccagtaccgggccgcgggtggacgtattccgtacattcaacggtctgcaggcgaatccttgcggtaggaatacagccagcaggcccacgagcgcagcgatggcgagaggcgcgttcaaggcaacggtacgccatagttcactgctgaccggttcgggcagaataccgaataccggaattgcaggaagctctttggattggccgagccataatgtgaaactggccaaatcaccgatggcgaatccgccgccgaagagccaggaaacagcccagagcatgacgttgggtagccagatcagcatggcgacggtggtgagaattcgtgaaccggtttccatcccggacaattcgaacaacgatacgacagcggcatggttgcgtaccgaccatacgatgacggtaatcaatccaattgccagatatatgctcagtatcgcgacggccaaggcgacgccgattttcaggcagtggcgtatgtccgccggcacctgcttgcgagtccagtccctgaatgctcgcattttggctgattccggtacggctgcgcataggaaaccgatcgagaatacgatggctgctttcagcaacaccagccactggtcatcgacaagacctaggtgcacggattgccggaatgcctcgttcaacccgagccaaacaatcaatccggcaacatacgcatgcggcccgtatgctttgattcgcatgatgagtgcattgatcagccatatcagcagtatggtcaacagcaatggcgtaatggtgagggtgaacgaatcggttctaaagcccgatccctcactcagaagcacaacggcctgtgtcagcgaggttgtgccgacggtgagattgtcgccgccctcttccatagagacgaccaataacatcagcgctgtatagcagcctaatgcaacggcatagatggccatggatgcgagggcgactatggctccccgcacccattggcgaatcacggctttcatcacgattggttggaaccgatcagtcgatgttggccttggcgagtacgtcacgcatgatttcggcggcctggcccggggtcttgcccacggggatgcccgccgcctcgagcgcgttcttcttgtcctgggcggtgcccttgcctccggagacgatggcgccggcgtggcccatctgcttgccttcgggggcggtgaaaccggcgatgtaggcgacaaccggcttggtcatgtgctccttggcccatgcggcggcgtcctgttcggcgaagccgccgatttcgccgatcatcatgacagccttggtgtcggggtcggcttcgaatacctgcagggcttccagcagcgtcgtgccgacgatcgggtcgccgccggcgccgagacatgcggtgaagccgatatcggacaattcgcccatgagctggtaggtgagggtgccggatttggagaccagtccgagcgggccgcggccgacgatgccgtcggggatgatgcccagattgacgccggggttgccgagcgtgatgagaccagggcagttcggtccgatgatgcgcacgcccttcttgagcgccagttcgacgaagtatgcggaatcggccaccggaatgccttcagtgatgaccacgatgagttcgatgccggcttcgacggcttcgaccacggcggacttggcgaacttcggcggcacgaacaccacgctggccttggcaccggtggcttcacgtgcttcgccgcaggtggcgaacacggggatgtccgcgtcggcaccgttcttggcaccggggaaggtgacggatgtgccggccttgcgcgggttcacgccgccgacgatattggtgccggccttgagcatgcgagccgtatgggtcatgccctgatggccggtcatgccctggacgataacgggagcgccgtcttcgatgaacagcatcagcgaacctccttggactgggtcgcctcaccggcgagctgcgcggccttggctgccgcgccttccatggtttcggacacatggatattcgggttattggcggaggcgaggatatgcagaccctcggcggcggcgttgccatcgaagcgcacaacgatcggcttggaaccgccgagcttggcgaccgcttcgaggatgccgttggcgacttccacgcaggaggtgatgccgccatagacattgatgaacacggattcgacctgagggtcggacagtacgatctccaggctttcggccatgacggctgcggaggcgccgccgccgatgtccaggaagttggcgggcttgatgttggtgccctgttcctcgccagcgccggagacggcatccagggaactcatgacgagtcctgcaccgttgccgatcacaccgacctcgccgtgcaggtgcacgtagtgcaggccgtgttcgcgggcgcgctgttcgaaggggtcgggaacgatgggatccacgaaacgcgcccagccgtcatggcggaaggaggcgttgtcatccaaggagatcttggcgtccaaggcgctcagctgcttggtggattcgtcatccgggtcgccgatcttggcgagcggattgatttccacgagcgtggcgtcgttgtctttgaagcagcgccacatcttgagcagaatctgtgcggcctgatcgacgtccgcgtggtagaagccgatgctctgtgccatttcggtggcagcggccaggtcgaagtcaccgagcgcatcgatgtgcaggcgcttgacggcctccggatgttccttggcgatttcctcgacttcggtgccgccgttagcggtggccagcacgtcgaagtcgcgcgaggtgcggtccacggagatggacacgtagtattcgtgcaggatgttcttggcttcggctacaagcacgccggaaaccttgtgcccgtggatggtcatcggcaggatggactcggattcaagaatcgcctcgtcgcggttatgggcgatcttgacgccgccggcctgaccacgatgaccgatcttgacctgcgccttgattacgcagggatagccgattttgtccgccgcttcagcgacttcatgggagttctgggcaaagatggcgtccggggtgggaatgtcctgttcctcgagcagctgacgcgcctggtattcgtaaagatccatcgatccttccctgactatgtaattggtccggcatgtaactgtacacagtacatgccggaccttgaaaactgactgtacgttgggtgagacgaaatctcaggccggcatcgcaatcagcgagctgctgggcttgccgtcgagcttatccagaccgtcgaggccatcgagccgcatcacgaaactgaagcccaccacggtgccaccggccttttcgataaggtcggtggcggctttggcggtgccgcccgtggcgatgaggtcatcgacgatgagcactcgcttccctgcctgtacggcgtcggtttcgatttcgacactggccgtgccgtattcgaggtcataggattcaccgatggtttcaggcggcaacttgccggccttacgcacggcgatgaaacccttgcccaaatgggcggccatggccgggccgaacaggaacccgcgcgattcgagaccggcaatggagtcgaattcgctcggggacaccggcagggcctcttcaagtgctttgagcagaatcttcaagcccttggggtcggcgagcactggcatgaaatcacggaagatgatgccttccttgggaaaccccggtacggaacgcaccaaggacaccagatattcggcgtcctgttgccctaccttgctcaatgcgtcgatggtgatgtccgactgtgccatagtgctcgccccttttatgcctttgcgatgcgatacgcggatggtgctaccgaatcgaacagcttacttcgtcttggtttcgttgtcgtcaccggtctcgtcagcggtgtcttcctcggacacgacggacgcctcgatcggaacctgaccagcctcatcgttagccggagcctcggtgtcttcgtcgggcagcgggttgccgttctcgtcgacctcatcatcggacacataggccgggcgggtgtactcacgggcgatggcgttgaagccgaaacgcagcttggagccttcggagtcgatgacgatctcctcatactgctcgtcgacttcgacgaccttgccgatcacctggccgatggtgatgacctcggtgccgggctgcaggttgcgacggaagtcctgcttctcctgctgttgctgcttggccttcttggactgccaccacatcatgccgccgaacacgacgacgatcacgatgagcataatgtactgttgttccacgaaacaactccttcaaacgagcgacattgacgaaacgccgccaagtgtgcaaacaggagaaagtctagaagagcttgctgacatcatctttgggcgtaattcccaaatgctgccatgccttctcggtagccacgcggcctttgggcgtgcgaatcataaaaccttcgcgcacgagatacggctcgcacacggtttccacggtttccgattcctcgcccaccatggccgccagattgttcaggcccacgggtccaccgttgaagttgcgcacgatggcattgagcacggcgatgtccagccggtcgaggccttcggagtcgatctggtacagggccagcgcctccttgacgtcgtccggccgcaccacgatcaggtcgtggacgatggcccagtcgcgtacacggcgtagcaatcggttggcgatacgcggcgtgccgcgcgaacgcaacgcaagctcatgagcggaacccgcatcaaggtttacgcccagtacgttggccgaacgttcgatgagcttttccaactcctcatgcggatagaagtcgagatgtgcggtgaagccaaagcgtgcgcgcaacgggcttggcagcataccttcgcgcgtggtggcaccgatgacggtgaatcgcggcagggtcagcgggatggagcttgcgcccgggcctttgccgaccatcacatcgacgcggaagtcctccatcgcgatatacagcagctcttcggcggcgcgcggcagacgatggatctcgtcgatgaacagcacttcgccgacgtcgagggagctcagaatcgaagcaagatcaccggcatgttgaaccgcagggccggaagtcacgcgaatcggcacttcaagctcattggcaacgatcatggccaacgtggttttgcccaagccaggagggccggcaagcagaatatggtccggtggcacatcgcgtttgcgggccgcgtccaggaacagttgcagctgggccttgagccgtggctgtccgataaagccttcgagaacatgggggcgcagctcctcgtcgctgaccggctcgttgccgatcggctgggaggagaccatgcgcaacgactcttcgttggcaccggtgttggaggctccgtaatccgttgtctcgctcatcagcggcccctatccatcagcgccaaagccagacgtagcacacgcggcacatcgtcggtggcaagcggcgtgggaatatcgttttcggcgcaagcctcggcaacggcctgttgggcgtcctgctgacgccagccaagtgaaatcagtccttcgacaacctgttccgtaccggtatccaccggagacttggatattgccgcctgagcggaagcaccctcgatctgactcaaatcaatagagcccttaagctcgaggatgattttctgtgcgcccttcttgcccagccccggagccttggccagcgcggtggcgtcgttgtcggcgatggcgtgggccagctgactcggcgtcagtgtggagagtaacgattgggccactttaggtccaatgccggagaccttgatgagttgcagaaaggttttcttggcgtcccgatccaggaatccatgcagggtaatggcatcctgagagaggttcatataggtgaagacgcgggtgtcttgcccggcgtgcagacggctcaggtcggtggcggacatgcgcacttcgtagcccactcccccaacatcaatcaatgcggtatcggtttcgaccgattcaacccgcccggtcagcatgccgatcatacaggtactccttcagggctccaggattcaagactcgaacaactgttcgaaagtatactacatgcctcggtcgtggttgatgcggcggcgcgtggatttctgtgcggcctcagcccactggcgttgcgcggcggtcagatgttgttcgcgttcgccgccctgcaatgcgcctgccgggcgcagcgcatggcaaatggccaaagccaaggcatcggcggcatcggcgggagtcggcattttggtgaggttcaaaatacgtgtcaccatacgctccacctgaatcttctgcgcctgcccgttaccggtgatagccagcttggcttcggtaggcgtatgcaacgccacgggaatattgcgttgcgcggcggcgagcatggcgaggccggcggcctgtgcggtaccgagtacggtgttgcggttggattgggcgaacacacgctcgatagatac

SEQ ID NO: 25 - DNA, 2492641 bp, Bifidobacterium longum (residues 1,246,322-2,492,641 of 2,492,641)
  source 1..2492641: mol_type = genomic DNA
cgcgtccggcgcgaatcggtccattttctcggacaggccgttgtagatggccagtagacgcagatcctgggtgatatccggtgaggaccgcaccacgtccacgtgaataaacgaaagccggcggtgctcgccggcttcgatcacgccgaccccgcaacgtgtgagcccggggtcgacgccaaggataatcacgaggattactcctcgtcgagctgggccatcacctcgtcggaagcggtccagttggagtagatgttctgcacatcgtcgaggtcatcgaggttgtcgatgagcttggacaccttgcgggcatcctcaaggctcaactcgacctcgttcttcggctgcatgacctggtcggcggaatcgtagtcgaagccggcttcctgcagagccttgcgcacggtgaacaggtcggacggaccggtcacaacggtgaacacttcaccgtcatcggtaacgtcctcggcaccggcttcggcggcggtttcgaacagcttgtcgaagtccacgccctcggacggcaccacaatctggcccttgcgctcgaagttgaaggacacggagccggaggtggccagagagccgttgcccttggtcagggtggaacggacttcggcggccgcacggttgcggttgtcggtcaggcattcgatgatgaggccaacgccggcaggagcgtagccctcgtagacgatgtcttcgtagttggcggcaccatcttcagcaccggcaccacgcttgacggcgcgagcgatgttgtcggccggcatggaggccttcttggccttgtagatggcatcgtacagggacgggttgccgtccgggtcgccgccgccgaggcgggcggcgatttcgatgttcttgatgagcttggcgaagagcttgccgcgcttggcgtcgatggcggccttcttgtgcttggtggtcgcccacttggaatgacctgacataatgctcctagcaattattgaaacggatgatgtcaaacgaaacgattgtaggccgttaatcagacatacccgtaatgtttccgatgattgtcttattgcgcgtaccgataaaaccggttgcgcgggtgccgcacccggtcaggcaagcggcaaatgatactgcggggccagctgttcgaatgcctgggcataggcgtctcgctggtcggacagcagaatcggcatggtacgcgtctgggcgacgatgggcatgaagttcgcatcgccattccaacgcggcaccacatgctggtgcaggtgcgcggcgactccggcacccgcgacctcgccctgattgatgccgatgttgtatccgtccggacgggagacggtctccatcaccttcatggcgagggtggtggccttctcgaattcgaacagttcggcatcgtcgagttcggtgatgaatccgacgtgacggtacgggcaaatcatgagatgcccgacattgtatgggtagaggttcatgatggcgaacacgtgcgtgccacgccaggcgatgaggccgtcttcgtcggattttttgggtccggcgcagaacgggcattccttcgtcttgggcttggttgggcgatcctcgctgttgcgcagcacataggtcatgcgctgcggagtccacagtcgttcgaccgtgtcctcctgaggcggaaagtccgccggattatcgacacgcacgtcagtcattttcgcaccctttcttggctcccctctctgaggggagctgtccgtgaaacggactgaagggagtgcgagccatgcaggactcccctcagtcgcctacggcgtcagctcccctcagagaggggagccagtaccattcacatcactcagccacagcagcgttgaagtcgtcggcggagttcacctggacgcgcttcttgatgacggtgagaatctgctcgcgagcagtgtccaccggcacaccgttgagctggctgccgtcgcggaagcggaagctgaccgcgttgttgttcatgtcttcctcaccgacgatgaggatgaacggcaccttggacttggaggcgttgcgaatcttcttgccgaagcgatcgtcggagtagtcgatctcgcaacggaccatctcatcttcaagggacttgacgaagccggccagatgcggggcaaactcgtcggcaaccggcacgccgagcacctgcacgggggccagccacgccgggaaggcacctgcgtagtgctcgagcagcacggcgaagaagcgttcgatggagccgaacagggcgcggtgaatcatcaccgggcgctggtgggtgccgtccttcgcgatgtactcgagctggaagcgctccggcaggttgaagtcgagctggatggtcgagacctgccaggtgcggccgatggcgtcgcgggcctgcacagagatcttcgggccgtagaaggcggcgccgcacggatcgtcgacgagctcgaggttggattccttggcgacctcggcgagcgtgttggtggcctcctcccagatctcgtcggagccgacgtacttgttcgggtccttggtggacagctcgaggtagaagtcggtcaggccaaagtccttgagcaggttcagcacgaaggtgagcaggctggtgagctcgtccttcatctgctcgcgggtgcagtagatgtgggagtcgtcctgggtgaggccgcgcacgcgggtcaggccgtggacctcgccggacttctcgtagcggtacacggtgccgaactcgaagaggcgcagcggcagctcacggtaggagcgctgacgcgacttgaagatgaggttgtgcatcgggcagttcatcggcttgaggtagtagtcggcgcccggcttggtgatgttgccgtccgcgtccttctcctcgtcgaggtgcatgggcgggtacatgccgtccttgtaccagtgcaggtggccggaggtctcgtacaggccgcccttggtgatgtgcggggtctgcacgaagctgtagtggtgcttgcggtgcatctcacgggagtagtcctccatagcgttgatcacggcggcacccttcgggtggaacacggccaggccggggccaatttcatccgggaaggagaacaggtccatctcggcgccgagcttgcggtgatcgcgcttggcggcttcttccaggcgggtctggtaggccttgaggtcttccttggtggcccatgcggtgccgtagacgcgctgcatggtcgggttcttctcggaaccacgccagtaggcggcggcggaacgctcgatcttgaaggccttgatgtagcgggtgttcggcaggtgcgggccgcggcacaggtccttccaaaccacattgccatcacggtctacgttgtcgtagaagctgagctccttttcggagatctcggtggcggcggccgggtcgaggtgtgcttccttgtcttcgatcagttcgatcttaaagggctggtcggcctcttccttcagagcctcttcctcggtcacggaacgacggcggaaggactgggaggacttgatgatgcgctgcatgcgcttctcgatgtccttgaggtcgttcggggtgaagggctggtcgacctggaagtcgtagtagaagccgtccttgatgacggggccgacgccgagcttggcgttcgggtagacttcctgcacggcctgggccatgacgtgggtggccgagtgacgcatgattgcgaggccgtcttcggagtcgagggcgatggggtcgacggtatcgccatcgttcagcggcgtgtacaggtcacggttctcgccgttgatcttgaccgcgatgatgttcttgtcttccgcgaacagttctacgccggtggtggttgcttccacctccttcgcttcgccgttgacggttatggagatggtagcttgcgccatgatttgtcctttgctatcggggcccacggtactaatgtgcaggcctggactggttaatcaacgtaggacacgataggttgggcgtgcgacaaataccaccagcatctgaaccaatacgaaaaaacctcgccgaagcgaggtttcgttgtggagcggacaacgggactcgaacccgcggtctcaaccttggcaaggttgcgctttaccaactaagctatgtccgcaaaggaatccgccgtgagaagcggaatccagtgggcgatgtaggaatcgaacctacgaccccttcggtgtgaacgaagtgcgctagccgctgcgccaatcgcccgaatactcggttcttcagttatatccagtcgaattgcttcgactttcgtgggcgatacaagattcgaacttgtgaccccttccgtgtcagggaagtgcgctaccactgcgccaaccgcccgggtcatatttcatcccattgaattgcttcgctggtctgagaggtgggtacgagagtcgaactcgtctatacggctttgcaggccgctgcctaaccgcttggctaacccaccgtaaggtctgtcaactcacggacctagagcggacaacgggactcgaacccgcggtctcaaccttggcaaggttgcgctttaccaactaagctatgtccgcgtgtgtttccttggcgaggtctccctaccgaagcacgagtgtttactatactcacatgcgtgtagttcgtccagctgcggcgtgtcgcctgtaattgcatactctcgcttatggctaaagcgtgcgcttcgggcaatgaattccagttactctagaggtatgagtgaagcagcgaaggacaccggcgcagtattgatcgccgcattcgagggatggaatgatgcctgtcaggcggcgacgaacgcggtgcgccatctggtcaagcgatatgagtcccgcgagattcgtcatattagatgtgatgatttctatgactatcaggttgcccgtcctatgctgtgccatgtttcgggtcgcaccaatcttatctggccacagaccacgttctacgacatcacgttggacgcaggcaagcgtatctatgcgcagatcgcccccgaaccaaactatcggtggaaggaatactgtagccagagtctggccattgccgatgagctggatgtcaatcggatcattacgttaggttcgatgttctccgattgcccgcatacccgtccgttgcccatcgccgtcagcgacggagactgtcaatgcgaaggagaccggtcgtataacggcccggtgggcattcctactgttctggatgtagctgccgcacaacaaggatttgctcattcctcgatgtgggtgtccatcccccaatatttgggcagcgacgaatgctctgccggcactatacgattgctggatgcgttgggcaagtatatcggcttcatcttcgatacggcagacctgaagcagaaagccgaacagtggaaggcgcaggcatcgatactggttcgttgcaatgaccagcttcatgattatgtggagcatttggagcacgactacgacttgcagcagaaagccgaggcggaggcttcattgggagcgccccaggctgaacaactagtcaaagaagcggaagcgtttctacgccagatgggcaattagccctatatacacaatatcccgctgacgggagctggctcgcgtagcgagactgagggtggttctgctggcatattccagtgaccaccctcagtcagcttcgctgacagctcccgccggcgggagcaccattaatattgagtcgcctatcgacccgtcttatgccgcagccaccacggagggatcgatggccggcagcacgcccacaatcagcagcaaggcgacgaccacagccaaaccgatgcggtagatggcgaaggccttataggagaagttcgatacgaacttcaggaatccgatgatcacgatgtagccgagtacgaagctgatgaccatggctacgagggtcggcccccagccggggaacatcgcatcggttttgtagttcttcacggccttgatggcttcgagcaaacctgagccgaacaccgcggggatggccatcaggaagctcagacgcacagcggcctcacgcgtgtagcccagtgcgcgaccgacggtgatggtgccgccggagcgggacacaccaggaatcagcgccatggactggcccaaaccgaagaggaatgcatcacgatacgtcatatcattcatggttttgttctggcgagccttggcatccaccatccacagcagaatgccgaataccaacagcacggttaccgtaatccacaggttgcgcaacgaggtttcgatgacgttctgcagagtgaagccgaggataataatcggaatcgagccgacgataatgttccagccgagtgtggcgtaattgtcgccgcggcccatgcgggccttccaatccttgccgttcttgccgaacaggcagctgaaccagtgagtaaggatattgatgatgtcgtgacggaaatacagaatcaccgcaagttcggtgccgatttggatgatggcggtaaacgccgcaccgggatcagagcccagcatcaaatcgccgaaaatacggatatgcgcgctggaggataccgggagatactcggtcagcgcctgaacgatgccgagaatgatcgcttggaaaaaattcatgacccctcgtgatttctaagtatttgatgtgttatgacgatgaacaccctatccaagggggtgtagaacaacactaagaatcggtaacatccacggcttctacaatgaaagtggatatagtacgtaagcgacgaagggagcattatggccacgtatcgcaaaagcagggcattcgcgccggaaggattcttcgaatgcgagggtcgaggactcgaatggttgggagcggctcatgcgcagggcggcccgcgcgtggtgcaggtatacggctggggcaaggattatctggatatcgaacgtgtgggcagcgcgtcccccacgcctcaggcggcacgagcttttggtgcggctctggcccatatgcatgatgtgggtgccgaatatttcgggtctgcgcctgacggatataacggcacatgctatttcggaccattgcaggacccagtgaaaatggataccggcgagtggaccgacccgatcagctatttcgctgatggacgtctgcgcccgatggtcaaccttggtgtgaggcgtggcgagctggataagcgcgatgtcgaactgaccgagcgcgtgattgaagcgttgccggatctgatgggccgagccgcgtccgacaagccggcgcgcatccacggtgatctgtggagcggcaatgtgatgtggaccgccgattccgggcagtccgaggccgtgctcatcgacccggcggcacatggcggtcatcgcgaggaggatctggctatgctgcacctgttcggtatgagctatctgagcgaaatcaccgagggctaccagtccgtacatccattgaaggccggatggcaggagcgcatcacgctctggcagctctaccccatcgccggccactgcgtcttcttcggcggcggctacgtcaacgaataccgctccatgtgccgctccctgctgaagtaacagacttggctcccctcagagggggagccaagaacgcatccgctctcagctcagtgcgtccttcaacttgctgaagaaacctttcttttgaccggcctgtgggcgggaggcttgggagacgtgcgtggcgcctgaatcgtgcgaggcggcgaactgttcgatgaggccacgctcggtttcgttgagcttggtggggataagcacattgacgtgggcgatgagattgccacgctcgtccttgttgcggatgttcgtgacgcccagtcccttcagcgtcaccgtatcctcaggctggcagccggccgggatggacacggtcttctcaccatcgaacgtgtcaatggacagatcgtggccgagcacggcccagctcatcggcacctgaatccagcagtgcaggtcgtcgccatcgcgggtgaactgcttatccgccttgatgcggatgtcgatgtacaggtcgccggcagcgccgccgccctcacccacttcgccctggttggccaaccgcagacgcgcgttgtcgttgatgccggcgggcacggtaacgcccacggtacgcgtggtgcgcacacggccgtggcccatgcagctggggcacgggttctggatgatggtaccgtgcccctcgcaacgttcgcagggggcggaggtcatcatctggccgagcatggtgcgcacgaccttctgcatgaatccctgtccgtggcagtcggggcaggtgaccggctgtgcgccgccctgggcaccggagccaccgcactcctgacacagggagaacgtattgatcttgacatgcgcggtgccgccgaacaccgccgtcttcaaatcgatggacgccgaggccaaggcgtcgcggccgggctgggtacgcggcaccgggccctgtgagccaccgccgaacgcggaaccgaagaacgtggagaacacgtcgctcatatcgccgaagcccgccccggagaagccgccggcaccggcgttcggatcgttcgggtcgacgcccgaatcatacatacgacgcttgtccggattggacagcacatcgtaggcgttgttcacttccttgaacttgtcctcgaattcggggcccgcgatgtcggggtggtacttacggctgagcttgcggtatgccttcttgatctcgtcgtcactggcgccgcgttccacacccagcgtctcgtaataatctgccacttgattgatcctttgtgttcgtttggtctgcgggtcattgtgccacagacggcggtcagtcttgggtccggccctcggagaggaaggcggtcaaatatctggctacggccctgacggcggccatagtggccgcatagtccatgtgggtcggccctatggagccgacgaaggcgatgggttccgtgtcgttcgtctggctctccgtctcggattcggtttcgggttcgcctacgggatcgttccccgccggttcgcccgccgcaccgctgcgcccatagccactgctgaccacggaggcatgcagtagtccgggggtgtgcatttcggagccgatggccacgcccacgccggatgcattcgtctcctcactcaggttgctcatgagcttcatcagcacgacctgttcttccagcgcgtcgaagagcggggccagatcggccagggaccgggagtgggccaggtgcgaggtgccggacatgtacagttcgtccgcgcgttcgtccaatgccatcgattcgaaggcgtcggccagcgcgtcggccacgccgcgcaccgactcgtagccggcgctggcggcgatggatcgcacggtctccgcggatttcgatagggacagtccgacacattgttcgttgacggtgttggagagccggttgatctcgtccacggcgggcatggatgcgatggtcaggccgtgctgggccacgcggccggtgtcagtaatcaccaccgcgagcaacgtggtcatggcaacgggcaccatctccacgtgccgcaatgtggccttggccagcgatggcgaggtgactatggccacttgaccggtgatttcggacaacagtcgtgccgaacgctgcagcgcgtccttgagactcaccgatccggacaggaagctgttgatgccgcggcgctgcgcctcgctgagcggcaccacggtagcaagtcggtccacaaagtatcgatagcccttttcggtgggcacacgaccggccgaagtgtgcggctgaatcagatatccttcatcctccagagcggacatgtcgttacggatggtggccgaactgacgccgagatcatggtcgcgcgtcagcgaagtggagcccacgggctcctgagaacggatgtaatcctccaccacggcgcgcagcaccagcatgcgtcttgattgcgtcatgcgcgcctccttatatatgcatacatattcatatcagtcacggttcactcagggcgtaccccgacggtcggttcgccacgccgcgacacgcgggaacccagaaatattgcctctttcttggctccgccacgtgcaggtggcgcacttcaccttagaacattgtattagcactccttaggcttgagtgctaatgcgttcgtttgcagcgtagcaatgttcactgtgaacgctaacagaacacaaactaccaaaacacgccaaaattgcaccgcaacgtcgcaaaccgacgctagcatggtaatcgcaatgtgagggcgtcaagcgcccggcacaagccggatacgcggcccgaccaattggaaggaaagtaatccatgaccgaattcaaggagaccgagctcgacgagcgcgccatcaagatggcgaaggtcctttcggctgacgcggttgagaaggcaggctccggccaccccggctcccccgtctccctggcgcccgtcgcctacacgctgtaccagcacttcatcaagcacgatccgaatgatcccaactgggaaggccgcgatcgcttcatcctttccggtggccatgcctccctcacccagtacgtccagctgtacttctccggctacggcgtgaccctggacgaccttaagaacttccgtggcggcgctgccacccgcaccccgggccacccggagtacggcctgaccccgggcatcgaaatgaccaccggccctctgggccagggcttcgcctccgccatcggctttgcctacggcgagcgtttccagcgcggtctgcttgacccggagaccccgaaggaagattccccgttctaccacaagatttgggccatctgtggtgaaggcgacatcgaggagggcatctccggcgaggccgcttccctggccgccaaccagaagctcggcaacctgaccgtgatcttcgacgccaaccgcatccagatcgaaggcgacaccaacctggtgctggccgaggacgtgctcaagcgcttccaggcctacggctggtacaccgacgagttcagcttcatccagcccgacggctcctacaaggaggacatcgagggtctggccgacgtcatcgccaaggccgaagccgccgccccggaccagccgaagctcatcaaggtccactccctgatcgcctggccgaccccgggcaagaccaacgacccgtcctcccacggctccaagctgggcgccgaggccgtcgccggcctcaagaaactcctcggctacgatccggaggagtccttccacgtcgacgaagaagccctggcccacgcccgcaaggtcgccgatcgcggcctggaggcccacaaggcctgggacgagaagttcgacgcctggcgcaaggccaacccggacaaggccgccctgtacgaccgtctgaaggccggtgaactgccggaaggcttcgacaaggcccttgacgaccttgaggccaccttcgaagtcggcaagggtgtcgccactcgtggcgcctccggctccgtgctcaacgccatcgccgccgtcatgccggaactctggggcggctccgccgacctcggtggctccaacaagaccgacctcaagggcgctgccaccttcgccccggccgagtgcgccaccaagcagtggccgaactgcaacgagttcggtcgccagctgcacttcggcgtgcgcgagttcaccatgggctgcatcaccaacggcatcctgctgggttcccacacccgtccgttcggcggcaccttcttcatgttctccgactacgagcgttccgccgttcgtctggccgccctcatgcagatcccgaacctgtacatctggtcccacgactccgtcgccgtcggcgaggacggcccgacccaccagccggttgagcaccttgcttccttccgcgcgattcctcagcttgaggtcattcgcccggccgatgccttcgagaccgccgaggcttaccgttacttcttcgagaagaagaacaccctgcctggcgccatggttctgacccgtcagggtgtcccggttcttgccgagaccgctgccaaggccaaggacggtgtcaagaagggcgcttacatcctggtcgacaccgagggtactccggacgtcatcctcatggcttccggttccgaggtccagtgggctgtggctgccgccaagaccctggccggcgagggcgtcaaggctcgcgtcgtgtccgtgccgtccatggaatggttcgaggagcaggacgccgagtacaaggaggctgtgcttccggccgctgtcaaggctcgtgtctccgtcgaggccggcgttgccatgccgtggtacaagtacctcggttcctacggcaagcctgtctccatcgagcagttcggcctgcagggtgacggcgctcagaacatgatcgacctcggcatcaccgccgagcacgtggtggaagccgccaaggcctccatcgccgaagtcgaagccgccaagtgagcaactaagcaataattcaataattgttggctcccctccctgaggggagctgtcaggcgaaagcttgactgaggggagcaatgcttgagcccactcccctcagtccgcgttgcggacagctcccctctcccaggagaggggagcctagggcttgaatccaaggagaaaataaatgactgaagcaactcagcgtacgtccgacaacggcgtttccatctggctggacgacctgtcccgctcccgcattgagtccggctccctgcaggacctcatcgccaacaagaacgtggtcggcgttaccaccaacccatccatcttccagaaggccctgagccaggtcggcccgtacgacgctcagctcaaggagctcggcaaggttgacgttgagaccgctgtccgcgagctcaccaccaccgacgtgcgcaacgccaccgacatcttccgcgagatcgctgaggctaccgacttcgtcgacggccgcgtctccatcgaggtcgacccgcgtctggcccacgacaccgagaacaccgccaagcaggctgtggaactctgggagaaggtcaaccgtccgaacgccatgatcaagattccggcaaccctcgaaggcctgccggccatcaccgccaccctggccaagggtatctccgtcaacgtcaccctgatcttctcgctcgagcgctacgagcaggtcatcgacgccttcatcgagggcatcgcccaggctgacgccaacggccacgacctgaagcacatcggctccgtcgcttccttcttcgtctcccgcgtggacaccgctgtcgacaagctgctggaagccaacggctccgacgaggccaaggctctggagggcaaggccgctgtggccaacgctcgcctggcttacgagctcttcgagaagaagtttgccgaggatccgcgttgggccgacctggctgccaagggtgccaaggttcagcgtccgctgtgggcctccaccggtaccaagaacgccgcctactccgactgcaagtacgttgacgagctcgttgccaagcacatcgtcaacaccatgccggagaagaccctgaacgctctggccgaccacggcaacggcgctccgtccatcgagggcacctacgaggagtcccacgccgtcatcaacaagctggctgagctgggtatcaacctcaaggacgtcactgacaagctggaggccgacggtgtcgccgccttcatcaagtcctgggattccgtgctggctgacgtccagtccggcatcgaccgcgtgaacgcctgagattattagctgatgcgcatttcgcgcattaactgattagctcacagaagctccgaccccaaccggtcggggcttcttacgtttgttgctacagtagtacgagcacatgagagaacggccgaaccgtaatgaacaaacttgtcgcacgccagcggttggtgatgacctttaccttcttttcgatgttcttcggagcgggcaacctgatcttcccgccgtttgtcggagctcaggccggttccgcgaccataccggcggccatcggcttcatcgtctccgcggtcggcctgccgattctcggcgtgctggcggtcaccttcgccggtggcttcgacaaactcgccggccgggtctcccccaaattcgccctgttcctcggcttggcgatcatgctcaccatcggcccctgctttgcgattccgcgtacggcgaccacctcgttcgaaatgatggtggcgcctttcgtgccgtcctcctacggctggctggcccaactcatctactcgctcgtgttcttcacactggcgttcctgttcgcccagcatcccgaaaaactctccaaagtgctcggccgattcatgggaccgttgctgctggtgctgattgccgtcctgttcatcgcctgcctaatccacggtatcggtaccccggccaaaccgatgggcgactactccacaaaccagattgcacgtggcttcctcgacggctaccagaccatggatctgctcgccgcgctctatttcggcatcgtgatttccgcgaatatccgcacccagcaggtcgatgacgaatcgcaagtgcagaaggagaccgcgtatgccggactcggcaccggtgtgctgctgatcgtgatctacggcgcactgagctacgtgggcgtggtgtccggcgccatcgccaccatcgatcccgccaaagacacgggcgcgaccgtgctcaccaatctcacctcgtccctgttcggcgcgttcggtaccgcgttcctcggtatcgtcttcgtcatcgcctgcctcaacgtatgcaccggactgatcggtacctgcgccacctacttccacactcggttccagaccgttgcagggagaacgttgagctaccgcacctggcaggtcatcttcaccgtgttcagtttcatcgtgtccaacgccgggctaagcgcgatcatcaaggtttccgtgccggtgttgtccgcactgtatccgatcgccatcgtgctggtgctgctggcgctgacccacaagtcgctcggcgcgcgattcccgcatgtctacttctggaccgtgctgctggtgggcatcgactccttcgccagctgcatctccagcctaatcaccgtcttcggcggctccatcggctggctggacacgacgctggccatgctgcccttgcagcaataccagctcggctgggtggtcccggctatcctcggtgttgccattggtatcgccgatgctccgcgacggtagttcttcccggtctgtgccggagtctggcggtcggtcggtgatggcggttgttgcgacgctcagcggtgccggtgtatcgttcgcaccactatatgagcgcatttggggcggcatgatgctgcatccgaactgtccggcgattggcagaatgccctactatctctcgggccaagcaactgacgattatggagtctgcgtcacctcaccactgtggtttatgacggtgactgcgctgagtgttgtcgcgattctctgtctgaccgttgcgggagtacagggcttttcgcgccatcggctctgttcccgttgccctgttctggtcaggtctcacgttctttacctacagctacaacactggtagacacaccgatttctgcccagcgctatcggcaactgacaatgcaggtcttgtcgcttattgcatcggccgtgaagctttgggactgctgaccgtcgtgttgtgcgtgctgccattgttctccctgctttcggcgattatggccatcacgttggctgcgcacgacgcgacaccaccggcataaaatctccttcatatcacgaaacaacgggcacccgttttgcgaggcattctatccgtcccgtgtttcgcaacgcatgagacggcacatccattgaatcaggagtctagaccatatctcgccgaatcttgcggtaggtggcatagaacaggaagccggccacgatgccggaggtggcgtcggagatgggttcggcgatgaagatgccgttgacgccgatccagtgcggcagcagcagcgcgagcggcacgagcaggatgatcttgcggaagatggccaagaacaccgactgtttggcctggcccatgccgacgagtgcgcattgcgcgcccatctggatgccgaagataccccagccgcagacgaaaatcggcatcatgcgggtcacgatgtcgatgacagtctgttccgaggtgaaccatgaggcgaaaaagccggggaatgtggcgagtaccgacaccagcgccgtggcggagacgatctgcgtgacgaaggccatgcggaccgcctggcggacgcgctccatatgccgggcaccgaagttgaacccgatgatcggctggatgccttgctggaagccgctggtcaggacgctcacgatctgcatcagcgaagtgatgatggtgatcgacgtgacgtaatcgtcgccgccgtagcgttgcagccccacgttgaacaccacgttgatcaggcattcggtgatctgcatgatgaagggtgccagaccgagcgccagcacggggatgatgatccgatcgaaccggatgttcaacggccgcaggcgaatcgcgctgcgcccggaggagaggaacagtacgatccatatggtcgagaccagttgggcgagcacgttcgcggcggccgctcccctgacgccccatccgaacacgaaaatgaacacggggtcaagaaggatggatatgccggtgccgatgagtacggagaccatggccacagtggttttgccctgcgccgaaatgaagttgttgagtccgagcgtgagttgcacgaatacggtgccgatcaggtagatggtgatgaagtcgaccgcatattcgatggtcgcatcgctggcgccgaaggcgtagagaatcggccgtttcgccaactgcagcagcacggtgagggtcagggctatggcgatgaggaacgcggcgctggtgccgaggatgcgttcggctttcttgaagttgccgcgcccaagttcaatggaggcgcgcggcgcgccgcctgcgccgatcagcgaggcgaaggcggtgacggccagcagaatcgggaagcagatgcccacgccggtcatcgccgcgttgcccacttcggggatgtgcccgatgaacagtcggtcgatgatcgtgtacgaggcgttcgccgcctgcgccacgatggtggggaccgacatggtcagggccagacggggcaccggtttggtgcccagcccggcatcgatcgtgttcgcctgtaccaaggatcagctctgccagtagtagctgaagaagtcggagatctcccccatggtttcgcgcagcatgcccatgcgcggcaggtacaccacgcggaagtggtcggggcgatgccagttgaacgcgccgccgtggctgatgaggatgtgcttgtcatgcagcaggtcgagcgcgaactgctcgtccgagtggatgttgaagcgtttgacgtcgatcttcgggaagatgtagaacgcggccttcggcttgacggcggtgatgccgggaatctggttgagcatgtcgtagacgaggtcgcgctggtcgtgcacgcggccgcccggcacgatgtagtcgttgacgctctggtggccgccaagcgcggtctgcaccacggactgggcgggcacgttcgaacacatgcgcatgttggcgagcatgttgaggccctcgatgtagtccttggcaatgcgcttgttgccggacaggatcatccagccgatgcggtagccggcgatcatgtgcgatttcgacaggccggagaaggtcacgcagaacaggtccggggccatcgaggcgatggagatgtgctgcaggccgtccatgacgaggcgatcgtagatttcgtcggagaagatgatgagctggtgttcgcgcgcgatgtcgacgatctgctggagcacttcctttgggtaaagtgcgccggtggggttgttcgggttgatgatgacaatcgccttggtgttgctggtgatcttggagcggatgtcgtcgatgtccggataccattcggactgttcgtcgcacaggtagtgcacggcggtgccgccggccaggttcacgcaggcggtccacagcgggtagtccggggagggcacgagcacttcgtcgccggtgtcgagcagcgcggacatggacaggttgatgagctcgctgacgccgttgccggtgtagatgtcgtcgatggtgacgttcgggatgttcttcagctgcgcgtactgcatgatggccttgcgcgcggagaacaggcccttggacggcgagtagccttcggtgtcggtgagctggtgggccatgtcgtagacgacttcgtccggcgtgcggaagccgaagggtgccgggttgccgatgttcaatttcaggatgtgggtgccgttggcctccatgcgcatcgcctcgtcggcgaccgggccgcgcacgtcgtagagcacgttgtcgagcttgtgcgatttgccgaaggtgcggcggcggcccacgggaatctcgctgtccgtctggggcttggcggcacccatggcaagcggtgtggcggcgtgttcgccgtccgtgacgctgttggatgcgtccgagttcaattgcgtggtggattcctcgccgcgcagccaattcgtgtcgacgtccagttcgctggccaggaattcgagcacgtcctcgcggggcatggtcttgccggccacatattggctgatgtggctcttgcccatctttacgccacgatgttcggcggcgtgcaccaaatcgacctgcttcaatcccctgctgttcatcgcattgcgcagacgttccgcaaacaccgatacgctcatatccttatgcctccaaccgggagttcaatttatcttttgaacaacggttcaaagcatacccccggttcaacacaagttcaattttggcgtgttctcaagtctcgaccggttcaacccaactgcgcttcaatccattgggcgacgccgtcctcgttgttggacgggcagatctcgtcggcgacggacaacaccttggggttcgcgttggccacggccacgccccggccggattcgctcatcatgttgatatcgatgaggtcgtcgccgaaggcggctgtctgttcaagcggcacgtccagtcgctcgcacagcaggtgcagcgcgtgctccttgttggcctgcgggttcatgagcatccacatcacgccttcgctgatggagatgtcgaagtccggcggaatcagcgcacgcagctcgttccactgttcaggttcggggaagatggtgattttgtccgccacgccttcgggcacgtcgtggaagttcgtgtattggaaggcctgagttttccaatacacgcgcacatcgaagttggtgtagcgcacgtcgttcatcacgatgccgagcttcaggccgggcatgcgatcgagcaggaacagacagacttcgcaggcacgccgtgaggagaagccaatcttgatcaaatggttctcatcggccggcgtggcacctgaggtgagcaggtcgaagtcggagtgggccgggtcgaaatcgatgagggcgccgttcagatagattacggcgtccaccggcagtttttcggcgaactggagaccggtactcaccggccgcgcggtggcgatggcgaattgcattccggcatcgtgcgcgcggttgatggtgtcgatgctgcgctgggtaatgaaccggtcctcgaatacctcggcgtcgtgcagcaacgtgccgtcgaggtcggcgaccagcagtcggggttgtttcggcgtgatggcgtcgagaatcacagcagcccctcacagtgttcacgcacgagttcggcggaatggtgcagtttggcccgctcgtcctcgctcagatcgagttcgacgatctcgttggcaccattggcgcgcagttcagtggggacgccgaggaacacgtcatgttcgccgtattcgccgtccagcagggtggagacgggcacgatgcggcgttcgtcccacaggatggtctgtacgatgccggccacggtggaggcgatgccgaagttggtgccgcccttggccgcgacgatctcattgccacgggtgcgggtcttctcttcgatttcggtggtggacacggaggcgaaacggtcttggttgtcggccaggaagcgggcgaatggcttgccgccgagcgagacggtggaccatgcggtgaactgggagtcgccgtgctcgcccatcacgaagccgcccacgttgcgcgggtcaaggccggtctcttcgccgatgatggtcttgagacgcgaggtgtcgagcgcggtgccggtaccgagcacctgggtgcgaggcagaccggaacgtttccaggcataccaagccatcacgtcgaccgggttggagaccatgacgatcacgccgtcaaaaccggaggccatgacgttgtcgaccacttcgcccacaagacccacggtgaagccgagttcggccatgcggttggagttggccggcggcttgcggcccacggtgatgacgacgatgtccgcatccttgcagtcggcgtagtcgccggcgcgcaccttgacgtggcggtcctggaattcgctgccatcatcgaggtcgcgggcctcccccagggccttggcggcggaacagtcgatgagcacaagctcattgcacaggccgtgcgtgacgatgccgaaggcggcggtggcaccgacccggccggtgccgacgataacgactttgttgcggttcatagtgaccatggtgatgtcctttcgtaatactcgatagaacgcatacgacccatgaccgacggtaacggtcatgggtcgcgagcgacaagtctatatggcgtgcaagccgatcagccgaggttgaacttggtcatcatgtcgaggccgatgatcaaggctacccacaccagagcgatgataacggtccaacggttcaggttcttttcggcgacaccggaagtaccggcgttctgggtcagaccgccgccgaacatgtcggacaaaccgccgcccttgcccttgtgcataaggatgagcagggtcagcacgaagctgagcagcacgacgatgacttgcagcgtgatcttaagagcggtcacagggtacctccggattgattggactgttgaccagcatagcgcacacacgggaaaaccgtggtattagttccgtgatttcgtggatttcagtgccagtcgagcgattttggcgagttcctcaacgtccagggccgcccctccgatcaggaagccgtcaacgtcgggctgggaaatgagttccgccgcatttttcgaggtgaccgatccgccgtacaggatacgtacgctatcggataccttcgtgccaaaagtggtcttcaaatcgttgcggatggcgtttgcggcatcctgggcggattgcggagtggccaccatgccggtgccaatggcccagacaggttcgtaggccacgatgagtttggcggcttgttcttcgttgagatcgcgggtgacgtctcgtacctggcccacggcgaaatcgagttcaatgccttgacgtcgttcctcgaagctttcgccgacgcacaaaatcggctgcatgccggcggcgagcacggcacgtacctgatcgacgatattggcgtcatcttcaggatggtatttgcggcgttcggagtggccgacgatgacgtatgagcagccaagatgggcgatcatgtccgcggacacatcgccggtgaaggcaccttgggtggtcacggaaacggattgtgcgccgtaggcgacatggagcttgtcggcttcgaccagcacctgcacgctgcgcaatgacgtgaacgaggggaaaagcgcgacttcgcagcgtttaaagtcgaagtgagcgtcacgcaacagccataccagcttctgcacgaagtaagtggcttcaagatggtcgaaattcatcttccagttgccggccaccaacggaatgcgtttggacgccatatgtttcccttctaaaaaaacgtagctcccctcaaggaggggagctagaaaatggattactcaagcaccttcaggccagggagctccttgccttcgaggaactcgagggaagcgccaccaccggtggagatgtgggagaagccgtcctccgggaagccgaggttgcgcacggcggaggcggagtcgccgccaccgacgatggtgaacgcaccggctgcggtggcgtcgaccagaccctgggccacggccttggtgccggcggcgaactcaggaacctcgaacacgcccatcgggccgttccacacgacggtcttggagtcgacgatcttgtcgtggaagagcttctgggactccgggccgatgtccagacccatcttgtcggccgggatggcgtcggcggcaacgacttccggagcaaccggggtgtcaccggccgggaagccggcgttcacgacgacgtcggtcggcagcacgagctcaacgccgttcttctcggcggtctcgatgtagcccttgaccttctcaagctggtcctcttcaagcagggaggtgccgacctcgtagcccttggccttgaggaaggtgaacaccatgccaccgccgatgaccagacggttggccttgtcgagcaggttctcgatgacaccgagcttgtcggagaccttggaaccgccgagcaccacggtgaacggacgctccgggttctcggtggccttagacagggccttgacttccttctcgaccagcaggcctgcggcggccggcagatcggcggcaacgtcgtagttggagccctgagcgcggtggaccacgccgaagccatcggaaacgaaggcctcgccgagggcggcgatcttcttggcgtaagcggcgcgttcgtcggcgtccttagaggtctcctccgggttgaaacgaacgttctcaagcagcacaacgtcgccatcgttcatggcggcgaccttggcctgagcgtcctcgccgtaggtgtccttggccagcggcacgttggtgccgagcagctcgccgaggcgggcggcaaccggggccaggctcagctcaggaacgaccttgcccttcgggcggccaaggtgggccatgaggatgaccttggcgccttcttcgcgcagggtcttgatggtcggcagagcagccttgattcgaccgtcatcggtgatggtggtgccgtccagcggaacattgaaatcagcgcgaaccagaacgcgcttgcccttgagatctccaaggtccttgagtgtcttcatgaatatcctttccttgacgaatcgcacgtcaaagtggccaattttgccactttgcatattacaggcattccggaacaaaacaccgcattcgtctactgactgaatgcggtgttttgtcacatcgttgtcgcgttttgccgaataggcacggcaaatcggattgtcgggttacttgccttcggctgcgcgagccttctccgtcttctcggcaagttgaagcagtcggcgaattcggccggcaatcgcatccttggtgatttgcggttcggcgatcttgccgagctcctcgaggctcttgtccacgtgatcgatgcgcagctggccggcctgacggaggttgtccggaatgttatcgccgagtacttcgaaagcatgctgcactttttcgctggcttcggcggcggccttggcggaacggcgcatattggcgtcatcgaagttggccagacggttggccttgccgcgggcctcgccgtcggagcgcttgccggtccattcgcgggccgaacgggtggcgcccatgagcttgagcatgcgttcgatggcgtcgggatccttgagtgtcacgcgctcggagctacgcagcgtgcgatgcttggcctggatgcctagacgacgggccacgccacacagggccatggcggcctcttccgtggggcaagcgatttccaggaagctggccttaccgggatcggacaggaagccacgggccatgaaggcgccgcgccatgccgctttgatttgggcgatggatccgttgaccacttcagacggcagtccacggacctgctgcttgcggcggtcgaccagtccggtctgcaaagccaaggccactacgttgcgggtgacgagcaccacataggtctcgacagggccgttcggggtctgacgtgtgaggtgattgacctcggcttcgtgcccgaacgtgttcctcaacgtgttcttcagccattctgcaacgtcaagcgaggtgaatacggcttggataacgtatgtattctgtaccggtcgaagaccgccgccaaaacggatcatggccgcagcttgggccttgatcgcggctggcgaatcgccttcaaaggctgccaactcgcttttgacatcgtccagaagagccaagatctacctcctacagtcccgttcttctcaatgcttcaggcgcttcgtgccgtcatctgctgtcacacggtcggaagccatcggctttctgtgatacctaatctggtggacaagcgaacccgtttgatacgtattatgggctctgctttctcgcagtgtggtcaccgaacgcttgcccgatgaccgctcgacgcctgcttacgatgagtgacgcttgtgctgttctctcgcggaaacggttacgttgagcccatgtgcgcgtaagcggcgagccagctcttcgctcatcgccaccgaccggtgctgaccaccggtgcagccgacggcgatggttacgtagtgcttgtcttcctgggcgtatccttccaacgcaatctcgatagctttctcataagcgtcgagaaattccttggctcccttgctggaaagcacgtagtcggcgaccggcttgtcgtgcccggtaagctcgcgcaggctgggcacccagaacgggttgggcagaaaacgcacgtcggccacgaaatcggcgtcgatgggcataccgtatttgaagccgaagctgaagatgtgtactgccacggtggtggggccggagccgagcatcgcctcgtagagtttggtggacagctggtggatgctcagggagctggtgtcgatgacccagtcggctcgttccttgaggtcttccagcaggtgacgttcctcaaggatgccgtcgatcagtcggttgccgtgctgcagcgggtgcgggcggcgcacggattcgtagcgcttgatgagcacttcgttgctggcgtcgaggaacagaatacgggttttgacgccgagatcatccagatggccgagcacggcggccagctcgtcgaaatagctggagcgcacgtcgatgacggcggcaagcttgtggacgcctgactccgatccggaaccggaggtggtcatcatgtcgacaagcgggataagcagtttgggaggcaggttgtcgaccacataccatcccatgtcttccacgcagtcagcggcatgagagcggcctgcgccggacataccggtgatgagcagcacttcgaaggcatcaagcggggtcggctggttgtccggagtcgatgtggatgtcgcggaattcgccggcgcattcgtggcggccgcctcgccggtatcgcggttcgttgtctgttgattcattacagcgcctcctcaagagctttgcgcatcgcgatctccagctggtcgtcttcggtggtggtgtcctgcagacgctggtcggcatcgctgggcgggtcgtcatcccagataccggtcatcagcaatacctgtacgagagcttggtacagcagcatttcttcgccgccgatggcgtgaccgccatgagcgcgccaggcttccatgagcttggtggggcgtggatcgtagatcacgtccaacagcagtccggagaatggctcggttccggcatcggcgagggcatccgcgacgttgtcggccgcgtgtccgggaatcgtgttgatgacataggtggcgttgcgggctgcctcgagcagggcctgatcgtcgcctaattcgatttcgttgtacgggttatgcacgttgacgaacttttcggccactggtttaagcccggtgttttttccggggtggcgggcggcgacgacgatatggccgatttcgggcatcatgcagcatgcggccaacgccgaagtggcggtgttgccattgccgatgatcagcgcggtgccgcttctcgacgcggtgtggtgttcgccgagttcgcgattggcatggtcgaaggcgagttggatgccgatgacatcggtgttgtatagcttgatgcccggcttgccgttcggccaagcggaatcatcggcagccacgctccagtcgaataccgcggtattcgccaccttcagttccttggcccacaaattttccggaacaccgtacggttggatggtcttcttcaacggcatggtcaggctcaggccagcccacgtcgagtcaaggcctttgaggaaagcgtcgaggtcgtcttcccccacctcgtgcttgtcgtacagccaatcgtcgagtttcagcgaacggtaggccgcgttgtgaagcacgggtgacaatgagtgtgcgacgggtttgccgagtacagcgcaacgatgattggccatatcccctccttgatgtctgttcccatgctagccgacactttgcttcgaatatgtcaaccacaggccccgcaaccgaaaatttactctgggctgctggaccgggccggctcactgctcgtgcagcgcgttgtacagcgcttcggctttggcgtggccgatgcctttgaccttctcgaagtcctcgacactggcttcgcgcatggctttgaccgagccgaagtggttgagcagccgcttctggtagctttcgccgatgccgggaatctcgtcgagcgcgctgcgcagggcgcctttgcgccgctgctggcggtggtaggtgatggcgaagcggtgggattcgtcgcgtacacgctgcagcagatacatgccttcggactggcgtttgaggatgatcggatagtcgtcgtccggcacccacacctcttccaagcgtttggccagtccgcagacggccacgtcgttcacgccacagtcctcaagcgccttggcggcggccatgacctgcggcttgccgccatcgaccaccaccaggttcggcttgtaggcaaagtgatgccggtttgtgttctgctggacgatgtcgggcggggactcccgcgcatcgttctgcactccgaccggcaccgcgtgccccttgccactgatgtcggaaccgccctcaccattgtcgttaccgttcgcagcgattgtctccgccgccacggcagtggtcatcttgccggcggccgaggccacacgctgttccgcgtcgatgctttcgccggagtcgccggcgatgttgccgtgcttgaagcggcgggtgagcgtctcgtaaagcgcggacagatcatccaccgcgcctttgccgtccttgcctcggatggcgaagcgtcggtattcggatttcttggcgatcgcgtcttcgaacaccaccatggaggccacctggaaggcaccgcccacagtgttcgaaatgtcgtagcattcgatgcgcagcggggcttccgcgagtcccaatgccttggccacatcgttcatggcctgggtgcgtgcgcccatgtcggagatgcggctcatcttgctgcgttgcagtgcttggctggcgttctcgttggcgcggtccataagctgcttcttgtcgcctcgcgaggccacacggatggtcaccgctcccccgcgcagattggtcagccagccttcgagttcctcacggcgggccggttcgacgggcacgatgatttcgcgcggtaccggtgcgatgggtgccagcaggtccgcgcgcccggtggtctcctgacgggtgttgcgttctcgggtggcctgggcgcgtgccacagcgtccgtggccgtgatggtttgcgtggagccgatggcctcgcgattagtggagatggtcgcggccgactgggggtgattgtccccggcggcgtccgaatacacctgcaccagaaggtcggccatcaagtcggcgtcatcgatgtcctcaactcgttcgacgctccagttgcgttcgccgcgaatcgagccggcgcgcacataaaaagcgtgcacggaggcttcgagctcgtcgctggcgaagccgaacacgtccgcgtccacatcctggtcgaagacgacggcgttctgttgcaccacggtttccagcatttggatctggtcgcgcagtcgggcggctttctcgaattcgagttcggcgctggcctctttcatgtcgcgggtcaactgggcgatgtatggccgtccgagtcgtccggtcatcacgccgaccagctgttcgcacagcctccggtgttcgtccgcttcaatgcggttcacgcagggtgcggagcatttgccgatggaagcgaacaggcatggccgtccggtcagttgcgccttatggaacacgttggtggtgcaggtgcgtaccgggaacgtgcgcagcaaccggtcaagactgtgccgcaattcccacactttggcataggggccgaaataccgggtatcccgccgtttgcgcgaccgcgtgacccacacgcgcggaattcgctcccccgtgctgaccgcgagatacggataggtcttgtcgtcgcggaactgcacgttgaaccgtgggtcgaattccttgatccacgtgtattccaacgtcagtgattccagttcggtggcgacgaccgtccactccaggctgcgtgcggtcagcaccatggtctgcgtgcgcggatgcagcagatacagcggctggaaataattggtgagcctgttgcgcaggttctttgccttgcccacataaatgacgcgcccttccccgtcgcgccatttgtacacaccgggtttggcgggaatatccgaggtcttgggtcggaacaggtcgcgagaatcccccagcaaaggtgccccattcgcattcaccttcgccgtcgtttccccggcacccacagctatgctttccgacattaacgccgccgcagtcttccgccactcatccggactatgccgctcaatatcgttcgtcataatcctcctcgctattaagcaaaaccaatcatcagggattgggtgggttggggtgtgtgttgctggaccgtaaagacttgacctgagcggcccggagcatgtccagcaacaaacaccccaacccacccgaggtcagctgcaatggaaggctaaagcatgggtttcaggaacttgccggtccatgaggcttcgcattcggcaacctgttcgggcgtgccctgcgtgacgatggtgccgcctccgtcgccgccctccggaccgagatcgatcagccagtcggcctccttgatcacatccagattatgttcgatgacgatgaccgtattgcccttgtccaccagggactgcagcaccttgagcagcttgttcacgtcttcgaagtgcaggccggtggtcggctcgtcgaggatgtacacggttttgccgtcggatcggcgctgcagctcggtggcaagcttgacgcgctgcgattcaccgccggacagggtgggtgcgggctggccgagtcggatgtagccgaggccgacgtccacgagggtcttcaggtatcgggagatgccggtgtacgccttgaagaagtcggcggcctcctcgatgggcatgttgaggatgtcggccacggtcttgccgttgtacgtgacttcaagggtctcgcggttgtatcgtttgccgtggcagacctcgcagtccacgtagacgtcgggcaggaagttcatttcgatcttcagcgtgccgtcgccgtggcaggcctcgcatcggccgcctttgacgttgaaactgaagcggccggggccgtagccgcgcacctgggcttcgggagtcttggcgaaaagggtgcggatcttgtcccacacaccggtgtaggtggcggggttggatcgcggcgtgcggccgatcgggttctggtcgacgtggatcaccttgcgcacctggtccacgccttccacgcgcctgtggcggccgggtacgatgcgtgcaccgttgagcttgtcggcgagcaccgggtagaggatcgtgttgaccagcgaggatttgccggagccggagacgccggtgaccacggtgagcacgccgagcgggaagctcacgtcgatgttcttgaggttgttctcgcgggcacccacgactttgagcacctgggtcttgtggatcttgcggcgcttggcgggcacggcgatctctcgccggtgggcgatgtagtcaccggtgatggagcgcttggcttcgatgaggtgcttggcggggccggagtagatgacttcgccgccgtgttcgccggcgccggggccgatgtcgaccacccagtcggcgcggcgtatcgtgtcctcgtcgtgttcgacgacaatcagcgtgttgccgagatcgcgcaggtggtgcagggtttcgatgaggcgttcgttgtcacgctggtgcaggccgatggacggctcgtcgagcacgtacatgacgccgaccagaccggagccgatctgcgtggcgagtcggatgcgctgcgcttctccgccggacagggtggcggccgcgcgcgagagggtcaggtagtcgaggccgacgtcgttcaggaagccgagtcgggccttgatctccttgagcacttcgccggcgatcagctgtgccgagccttcgagtttcaggccgttgatccaggcgagttcgcgtacgacgggcatgtcgcacacgtcgaagatggattttccgtccacagtgacagcgagcacttcgggcttcagacggcgtccgtggcagacctggcagggcacttcgcgcatgtacgactcgtagtattcgcgcatggactgcgaatcggtttcgtcgtggcgtcgcatgagcgtgcggatcacgccttcgaagccggtggagtattcgcgcaggcgtccccagcgattgcggtaggagacgttgaccttgaagtcgtggccgtagaggatgtcgtgcttgacgtcgtccggcaggcccttccaaggggtcttcatggagaagcccatttccttggccagaccttcgaggatgtggccgtagtactgggaggtcatcttggtgccgctccacggttcgatgacgccgtcggccagtgacttgtccgggtcggagatgatgaggtccgggtcgatttccagtttgaagccgagaccggtgcaggcggggcaggcaccgtagggggcgttgaaggagaaggtgcgcggctcgacctcgtcgagttcgagcgtgtgcccgttcgggcagctgcggtgttcggagaacggctggcggcgggccgggctgccttcctcctcgtccacgaagtcgatgacgatgctgccgttggcgagcttgagggcggtttccaccgagtcggtcaggcgttggcggataccgtccttgaccacgagtcggtcgaccacgacctcgatggtgtgcttcttctgcttggtgagtttgatgtcgtcggacagctgcgtcatctcgccgtcgatgagcgcgcgggcgtagccgtcggagcgcagcagctcgatcatatccacgaactcgcccttgcggcccttgaccacgggcgcgagaatctggaatcgcgtgcgctccgggtagccgagcagtgtgtcgacgatctgctgcggggtctgggaggcgacgggctcgccgcattcagggcagtgagggatgccggtgcgggcgaagagcagtcgcaggtaatcgtagatttcggtgatggtgccgacggtagaacgcgggttgcggttggtggtcttctggtcgatggagacggccgggctcaggccctcgatgaagtcaacgtcgggcttgtccatctgacccaggaactggcgggcgtaggcggatagggattcgacgtagcgtcgctggccttcggcgaacagggtgtcaaacgcgagcgaggatttgcccgaaccggacaggcctgtgaacacgaccatgcgattgcgcggaatcgccaggtcgacgttcttgaggttgtgttcgcgcgcaccctgaatcgtgatcttgagatcgttcgggatgtgcgagatatcagctaccagcgaaccatcgtgttcaatcagcggcgcctttttgatctcccggctcaggaaggagtcgctggtcatcaccttttcgacgatgacctcaccgttcttgcccttgccggttttcgcgcccgttgcgcttgttgcgcgccttgcgccagtctgcattgccgccacagccacaccccaccttccatctcaccgttcccgcgcgcacggtcatgcgcgcgccaaatctgtcccaaggatacccgaacacacgaccaaattcgaacgcttgttcgatggcgtgtcaggccggaaaaccgaaccatagtatgcaaaattccggaccatcagtggaccgaaacgcaagagccggcccccaagatactcggggcgtccggctctcacttccatttccccagcggggttggcttaccatgaagtatacacggttttaggacatcaatcactgtcgatgaacactgttcgaacatggccgaggaattcatcgtatcttccagtaccggcctgggcatcaccgtacgctcctagcagctgatcagggagccatagccttgcatcagtctcccctgcacagagttcgacacgaattggcccgataaatctgcggcttctcaatccatcgatgaaacggatatcgttcctgtcctgtgaaatctcgcgccgttcaagcacaagcgtgtccacgttgtattctgtttccagcagaggcagaagacgttccaaacatttacggcgagcgcgttcggcggtattccactggctcattggtaccgcagccacaatgacatgatcaatgtccattgcagccatggcatcaacgactttgccacgcaatgatggccgcatgtctcgccagtgcaatttccttgctcctttgggcttaagcaacgccaatctttgccttgtttcggtttccgtatcatcacatacgcatgcgcccatcaagtacataggcgagggaactccggttttccgcacactctcgtcaccccaagcggttgccatgtttgtcccttctcgcgcaacgcaaaacaacagttcgatagtatcggatagcagtgccggaccttgcagctatgcaatgccgttgcattattaatcggaaggcataatgtgagacgagaaaaagctaagccgttctagctcttggcaacatccccaatcactcagcctaaatcggcaaatcctgattttcaatggactccacggggatgccaagcttgcgtaattcgtcaactgcatcacgcatgggaatgcgttcctgttcgatacgccgataagcgattgttttgtcagcacacagtcgttcataaagacgtcgctccgccgattgaaggccgagcgtcggcttaggctcccgcatagcaatcttcgcgctgcgttcagtacgatcggtaccaaatctgtggtaccgatcgtatgcatcgcaatccatcaggatggagtcgcattcgatacctgattcacgtaatgtcgaaagtatttccagtccatccgcatccatatcaccccaatacacgatacgcatgtcacgcagtgcaggaaccgcaggtacagcatcgcttacagcgcgaccagaaccccatatgcagatgccctgcgcaatcggcggcatagtctgatacgtgtctttgttctcaacgatgacagcatatttaatgccggataacgcttcgccttcccacggacaccatatgatgcgttcgagctcagcatcgtcgcggaccggatcgagataacggaaccgcagttcggtcggccgttttgacagacccaacgtttcgacaccgagcagtcggcaaatggccttacgacgattggtttttgactcattcagccatttgccgctgaatcctgtcagtggaatctgtcgcggcgtcataccggtcacgtcatgatgcctgaaatatcgaactgcgctgacaagcagatcgaagtcgtcaggctgttcatggcctgtcatgcgagcggccgattcgattgtttccggagcaacgtcacaagcagcaaccagacatgctatgcggcggtgcgcttcgcgatattccgccgccagcgtacgaccaaccacacgcatggctattgattcgtcaggaacgacgactttggagatcaactcgacagaggtgcctatggtgcgatgcttggttatgatttcgcaaccattcttgcttgcccattgccgtatctcattgttgttgtcatgcactgcaatcgcattggtttccaaaaatgcttggtccggcaatcccaccggcacgggaaacggccatgccggttcgatgtcgtacatatgtgaacgcatatgtttcttcacgcatgtggtgatcgcagcgatgtctttcatgccggccatagttcccatcacctgctttcgaacatcgtcgagtcgaaccgaatcgtcttaataccggcgacgccgggactgctcattcggcaaccccgtcatccttcaatatatccgacgatgattcatcgtccatgtcattctggtacagcacggcctcgcgcagggaggtgaggccggtgtcggggtccttgtaggtcacgtaggccttggtggagacctcgaggatttcaccggtcttgctttccggggcggagacgatgacctggaatccgaggcgcggcagcaccgtgagggcgcgctgcgtgtaacggccgtcggccttgatgagcgcctcgtcgaggaacagcgtggtgtacgagggctcgctggtcaggccgccgccaagcaggtagatgagcgccgcgccgtatacgaacgaggtgagctcctgcaaggcgccgcccgagcgaccaccggtggaggtgatgcgttcgtccggaccgtcggcatgatgcacgatggcgtagaaggacgagcggcagcgcgggtcgagattgcgggcgccgtagcttttcacgccgttcgtgtccttgacctgcgcgagttcggcgcgcagcagcccgaccatcggcgcacaggccgcgaaggccttgcgcgaggcgtcggaatcgttgacgtcggcggatttccaatcgttcagggtgccgatgacgcggatgagctgcgtccagaaggcgcgctcgggacggcgcacgtccgcgtgcagggacaggctgccgtgcttgggaccgaactgttggcctttgagcatggcgttgatgcggtcaagctggtcgtggatgtcactggcatccgtgtcgatggcgcgtttgatggtcaggaagctcctgagcagctgttcgagacagcgccggtattcggcgtcggtggcggcaaccgcggccagctgggtgaggctggcgagttcgtcgagatagtaccggtagtcctccacgctggcggtcagcgagtcgtcgtcggccgcgtagagcgcgatgtaggtgctcattttcgattcgacgccggtgcgcgcggcgtcggcctggccgttcagcagattgatgcgggaggtcatgtccttgccgatgccggcgatggtgcgttcggggaaactctcccccggcgcctgcgttcctgccgcgcccgcgccgatgatcatgtgcgcgcgcatggccgcgtccgccagcccggcgaatcggttgtcgtaggattcggcgagcgccgccgtgacttcgtccggcagcgggccggaagcggcgtcatcgtcattgtcggcggtggcaccggcggcgtccgtcgtgccggtgtcggcatggtcgcgcagccagatgagcgccgcttcgacggcgctgccggcgcgggccgcggcctggtcggattcgatgcgctggcgttccacacggtcgagttcggcgttcagttcgtcgcgctgtttggcgagttcggcgagtttgggatcgtttttgatggatgcgatggcgtcctgcgtgtccgtgatggtccgttgcgcgccggcgatgtcgatgcgttcccatgacgtgtaggcgagctggttggccagttcgagttcgcggtggaggttatcggactgtgttttggcggccgtgtagtcggtgtcggcttggctgagcgcgttgcgggcggcgtcgacctgcgctgcgagcgcgttgaggtaggtttcgttgacgaatccgatgacctgggcgcggtctttggtgccgtgctggccgcgtgcgccggatttgatctgaccgtcggcctgcacctgacggttggtgcggtcggtgtcgtcgatggcggtgacgcatagggcgtcgaatcgttcgtcctgggtctgcgagcgcagccagtcggcgaagggcgagtcgtcgcggtagcgcagtttgccggacaaccagtcgccgtcctgttctccggtgagtatgttcgcgtgcgcgccggtgtcgtcgtagtggcgtgcggtgtccacgaactgccaggtgcgtcggggcatggtgcgcgggtcgatggtgctgactttggcggcgaagccctgttcgtggcgcttgtcgacgaggatggtctgggcgatgggcgcgtaggcgacgttcatggcgagacgccagtcttcctcgtgttcgttcacgtccatgagttcggccacgtacggcagttcggcgggggtgagtccggtggcgcggcagagcatggcgcgggtttcgtccatctgctgggagatgcgggtgcgctgggagcgttgccggtcgaagtcgcgttgcagtcgttcgaggtcgccgcgtgcgccggcccgcgcgttgatggcggcggtgagggcttcctcgcattcgccgtctcgtttgttgtattcgcgtttgaagttcacggcgttgatgcggcgttcgttccaggcttgttcgtcgccgggcagcgtctcgccgatggatgcgaacgtttgttcgattcgtgttcggttggcttgcacgtcttcgagggtgcggcgggcctggtcgagttcgagttcgagtcgggtcaggttgccgccgtccagaccctgcatctggccgcggatcatgtcgagacgggtgcgcaggtcttcggttcggcggcgcagcagcttggcttccgcctcgctgttctgttgttcggcgcggtcggcgggcagttggacggcgacttcgccgcgcatgcgggccaatgcccagtcgcgcagcacggccggtaccgtgccgtcgacggccggcttgaccggttcgaaggcgcgggccttgccgcgtgcggcggcgtattcgccgtaggcctgttggatgccgcgcagcgtgtccatgcggcgggtcttctcgtccatggcgtggaagttctcgtcgtaacgttcgtagtcctcgaccgtggtgcgggccaggtccagggcttcgggcacgccgagcacgccttgtttgaagatgtcgtcgagccgggagggcgcgtcggcggactggatcttgtgcagcagtcgacaggcggcctcgctcaggcccattgcgctccagatgtgtgtgtggaacgcttcggcgctggggaatgtgaggcagtcggggtaggtggctttgagctgggccggcgtgaacggggcgtcacggtattggtccatgcgcctggggtccacgggcttgccccagaccacgtactgtcggcgcacgtcgccgcggccgtcgccgggcatcaggtagaggaatttggcgcaggagagcacctggccggtggtctggttgcgataggtgtccacgatggcgccccacacgggttgcggtgcgccgttctcgtcgcggccgcgcaggtagagcggctcgtcgccggtttcggtgctgcccacgccgaccatgccgcgcaggtaggtgtagtcgctgcgttcggagcggccggagttcgaggccttgttgaacggcgtaccggttgggtacagcagggagatctgcgcgtcgaccagcgtggatttgccggattcgctggcgccggcgagcagggtcaccggcagcttgtggtccgtggaggggcggaattcgtggtagccctcataggagccccagttgatgagtcggcgggattccagcatccaccggtccgcgatcatctgcacgtctgtcgcctgcatcattcggctcccttctcgtcgtcatcgtcatcttccgtgtcgccgtcgccgtgttccgcgacgtcgagccaggtgtcggccagttcgcggtcgagcaccacgggcacgagcggcgtgatctggtacatggcttcgtcgtccaggcgcaccaaatacccgtaggtgatcatcgcggagacgatggcgccgatctgctttgccacgccttcctcgtcgttgcgggcggccagatagccggcgccggtggcgagcgcggcgcggatctcctcaaagctgacgagccagtcggcggggtcggcgtgcacgttctcgtattcgaggacgcggatgcgcaggaaggcgagcagcgcggcctcctcgcgtttgaggctgacacgggttttgagcgagcgcagggtcacgtcgtcgccggccacgggcgtggcgtacatgatgcggtagcgttcgttgatcaccaagtcgagcaggtcgttgttcagggagcgtacgacggcgtcgcggttgtcgagcacggtgtcgtaggtgggcccgctgatatagcggtcgcgtttgagggcgatggcggccatgcgtgcctcggccggcatgtcgccgatgtcgccttcgaacagggcgtacgggttggcgttgtccatatgctcctcgtgttcctcgtgttcctcggccacggtcatccttcctccacaatgatgctcagctcgtccatgtcggccagcaccggtctagtgatccagttccggggctcgccgtcgatcgatacgcaatgccaggtcgcggtatcgccgcgctgcgccggggccggctcggtggcgatgtcgctgtcgaccccgacgccgacgccgtcagtggacggctcgtcggcgatggcgttgccgcttacggctcccagcccgcccaggaagccgacgatctcgctttcgcggcgttcgctttcgggcagccggttgaagctggcggcgatgtccacgagggttgcgccgggcctgtcatcggacctgtcaacggtcaccgggttgcgccggatgaggctgaccatgcgcaggagtcgggggccgccgctgttgaccatgtcccgcagatcggccaccggagtcgactgcggggcttcggcggcgaggtcgctcaggccgggtgcggtggcgcgggtcatggatttggccgggcgcatcggcaatggcgcgaacagcgcgtccgaggtggccgtgtcgtacgggcgcgaggcgtctcccatatgggttttcgcatccgcgttgaggcgcgcgtacagtcggttcaagcgggtgagcatcgtgcggtagcgagtgtcggtttgctggcgcacgagccggctgatcgcctcgtcggagacgcgcatctggcggcgcacggcttcgatgccgtcgtagatgcgggccagttcgtcgcggatctggccgagcagcacgccggattcgccggccagatacggggttttggcgatggcgcgcagggcttcgtcgatttgctggcggccctcgtcggtgatgatcacctggaaggcgtcctcgaagcggcggccgctgtctgattcgctgaacgagcggcggtattcatcgtggtagcgggtcaggttctcgtccacgctgatgtcgccggcctgcatgcgccggcgcaaggcgtcgccgttgtcccgctcgtcgagcacgagttcgcgcaggtcgatgggcacgccgcgcagcgtgttgtggatcacggcgatcacgtcctccacctgggcttcgctcagcgtggcatgctgcttgccctgttggatgcgtttgatctcgtgcttgcgttccttgatttcacggttgaggagtttgatgcgctcgccggggtcggcggtcagctgcatgcgcgcgtgctcgatttccatgatgatgctgttggcctgcgcgccggacagggcgcgtgattcgtcttcgagcctgctcagcgcctcgatggcgcggtgggcgcgggccgtcaaacggtagaggaatcggtgtgaggccgcatcatgcgagttggcgagccaggcgtagtcgccttcgccttcacgggtcaggtcggcgaggatctgatgagcggcctcggcgaaggtctggtcctcgcgcggcgcatattcgccggcgtcggccagagcgttcagactttgcgcgaaccgctcctccacggtctcgcgcggcagctcgccggtgagcgggtcgaacgtggaacgcagcagcgacacgtacagcatcgcgttctggcgcaacagcaaccgcaggacgcccgtctcatacaccggtcgcagccgttccagctcccgcatcacatcggccacagcatgcctccctctgtcgtgaccgcaccatactagccgatagccgcgaaccacaccccgcccgcgccacgcccttcgcccccccccacagggaggggcgccaagccatgctaaaaaatcacagacagactattgcctctgcgggaaatcatcgttagattggcgagaggaatattgtcaatgcatacgaaacggaaaacatcgtgaccgcaccgaacacgcccgccgaaacctctgaccagctcaacaagcccgccaaatccggcaaactggaggtctccgacctcatcaccatcggcgtgtttgcggccctgtacttcgtgatggtgtgcatcgccacactggtgagcaccctgttcaccagcggcttcggctccatcttcctgcccgccatcacggccctcatctccggctgcgtgtacatgctgctggccgcacgcctcggcaaattcggcggcatcaccgtcatgggcgtgatcatcggactgttcctgttcatctccgggcatttcgtgctttcgttcatcgccagcatcgtgttcccggtggcggccgacctcatcgcgcgcgccggcaagtataagagcaaggcgctactgctcgtcagctacgtggtgttctcctacggcctgaccggcccgatcctgcccctgtggttcatgaaggacgcctacgtggcgagcctgcaggcgcgcggcaaggacgcagcctacatcgacggcgtattcgccaacatcaacaccggcacgttcttcatctcgatgatcgcgattctggtgtgcgcggttctcggcggctggttcggccagcgcatgatgaagaagcacttcatcaaggccggtatcgcctgatgaatcctgcccgccggacgctcgatccgcgcgcgaaactctaccttctgctggtggcgaacctcatgctgttcttccatgtagggctcgccacgcaaatcgtcatggtcgtgctgttcctgctacccctgctggcggccgcccgatggcgaaccgcgttgaacttcggcgtgacctatgccgtactcaccgcgctgggaatgctcgaccccgatgccctgggactgccgtggctgcatgtggtctccgcgctggccgtgggcgtcacgatgatgctgccctgtttcatcaccggcgcgtatacgttcaccaccacgtccgcgagcgcgttcatctgcgcgatgcggcgtatgcgcgtgcctgaggccgtggtgattccctgtgtggtggtcatccgcttcttcccgaccatcgccgaggattaccggcagattcgcaatgcgatggcgttgcgcggcatcgcctccggcggctgggggctggttcgtcacccggcccaatcgttggaatacattctaattccgctgctgatgaacgccaccaatgtggcacaggacctgtcggtggcggcactgaccaaggggctcgggcgtgagggcgagcacacctcgcgcacgctgatccgtatgaccgtggtcgactggctggtcatgattgtggtcactttgccgctcgcgctcgatatcgcgggggtgatctgatgggtggaaaccaatcgcagccgaatgcaactgccattattgggaccggcaagggtggcccactcgacacgtctgcgggaaccatcgcctcccgtggcatctcctttacctatgaccatgccgcagagccggcattgcgcgacatcacgttgaccgtgcccgcaggcgagtgcatcgtgctgtgcggggcgagcggctgcggcaaaaccagctatacgcgcgttgccaacgggctcatcccctcattcttccatggtgcgttcgccggcaaccagaccacgtgcgggctggatgtggagaccgtgccgatcgaccggctcaccccgctggtcggcagcgtgttccaaaacccgaaaacccagtatttcaacgcgaacgtcaccgacgagctcgccttcccggccgaaaacatagggctgccggccgaggacatcaatcgtcgtatcacggccgtggctgagcgctttggcattgggcatctgctgcatcgcagcatcttccacctgtcaggcggccaaaagcagcgcatcgccgtggcggcggccaccatgctggggcccaggctcgtggtattggatgagccgaccagcaatctcgacgcgaacgccatcgcggacatgcgcgccatgatcgagcagatgaaggacgaagggctcaccatcgtaatcgccgaacaccgactcgcatggctcaacggcgtggccgaccggtacgtggtattcgacggcgggcatatcgtgcaggattacgaggccgatgaattcctgtccctctcccccggctgcgtggccgccatgggattgcgggcgttggacctgcaaccgtatcggcaccggattgcgacgctggcttcaagcccggccgcggatgagtgcacttcggcattgctcggcacccataacctcaccatcggatacaaaggcaaggacggcttcacccgcgccatcccggacctgcggttccgtgccggcgaaatcaccgggctcatgggcaacaacggctgcggcaagaccacgctcgtgcgcacgttgaccggactcatcaagcctgtttcgggccgcatcgagctcaacggcgtgcccgcgaaaccgcgcgacctgacccgcgccggattcctggtcatgcaagatgtcaactaccaactgttctccgacagcgtgcgcgaggaactgctcatcggactcgacgagacggatgccggcatcaccgctcaagccaatcaggtcatggccgatcttgaccttgcagcgttcgtcgaacggcatccgatgagcctgtccggcgggcagaagcagcgggttaccatcggctcggcattgatgtgcggcaaggacctcatcatccttgacgagcccaccagcggactcgaccgctaccacatggagcaggtcggcgaactgctgcggcaactggcgagccaaggcaaggcgattctcgtggtcacccacgatgaggagctcgccgccggctggtgcgaccgcattgtcaatcttggcgccgacgattccgggaacaacggctcgcatgccagtaacccagatgccagcagccccaaccctaatgcctctaccaatttcgccaccgcatccacccatgaaaggaacgcgcaatgaccgccagcaacaccacggattccacggccttcgacatcaccgactggctcggtgaatgggaaagcttcgagcattacattgattcggatgacgccgccatccagcagacctgggaagccgccgagcaggcggtgctcgccaacccgaagatggccccgatggccgcgcgcggcatcaggacgttctggtcgatggcttgctccaccaccagcccggagaacatcatccatatcggctactggcgtgtgaacgagccggccgccgaatccggctccacggacgatgccgcgctcgccatcgaatggttcgccgaggacgacaccagcctcgacacctacgaatacaccatcgaccatgtcatcgagcacggtctcgaaggctcccccaccttcgtgttccacaccaccgatccggccgccgaagacagcccgttccgctggctacttgccatcaatccgctgccttcgcgcaaggcgttcgccgagggcgggctgctcagccacctgcatttccagtacgccaacgatctgcacacgctcgtcgccacggatgaggccaccggcgtcgagaccttgcgcaatccgcgttggtacgccaccatgtgcgccaacgagggaaccgtcgaggaccgttgcgccatcatccgcgcgttgcaccacttgcagtagacctggcaacatacggcagtgacggctccccactagtgaaactagcatcgcttcagtagccgtgcgagtgcagatactcgtcatcgaagccgaaaaaatggccgatctcgtgcaacacggttttgcggatccgttggcgcagctcggcctgcgttgagcatacgcgttcatgcggccccttgaacagggtgatgacgtccggcatcacgccgctgtagcccgtagttcgcttcgtgacgggtatgccctcatacagtccgagcagctcaacgcacggattgctcattgtagccagttcgcgctcattgggttcgtccgcaacgacgatgccgacattctccagcacccgcgcaaaccgttcaggcaaatcatccaacacctgttcaatggcccgttcaaactcatcgtcgctgatgtgcattcgctctccacacgcgaaatgccttggcaccaagtatgtaccaaggcgctgaaatctcagactagcaggctcagctgttgcggttgatctcgatgtcggtgacggtgaggttggcctcgttgatcaggttgaagaggatgacttcggccagcgggccgggctgcatgaaggtgtgctgcttggcctcggagacgtagtcgcgactgtcacggtagaaagcggtatcaatgccgcccggatagacggcgaccaccttgacactggtgcccttgtatgcggcctgcaggctcttggtgtagcctttctcaccccacttggtggcgcagtacacgctttcgttcgcgttgccgcgtgtggcggcggtgctcataatctgggcgattttcacgttctgctcgccgcaggccttgagggtttccaccgtccacagaatcatgcctttgagtcccttgagacatttgtcgacgtcggcggcctcgtaggcggtgggcaccttgaacgaaggctggccggcgttgttgatgagcaaatcgatgtggccgagcgtggcgatatccgccacggattccttcacgaacgcttcgtcggtgatgtcgccgacgtaggcgcggtaggagtcatcgggccactgcgcggtcagttcggcctgacgttcggcattgaagtcgacaccggccaccagccagccgttggcgatgagctggctggcgagctcgtagcccaagcccagcgcgctgccggtgacgatggcgattttcttacctgttgtggttggcatggcagacctctcctactactattcttcggctacgagtttactactattcttcagctacgagttcgagatacgaatcattccagaggtcttcgtcgccgtcgggcatgaggagcacgcgctcggggttgagcgcctcgacggcgccctcatcgtgggtgacgagcacgatggcgccctcatacttggcaatggccttcagaatctcctcacgggaagcggggtcgaggttgttggtgggctcgtcgagcagcagcacgttggctcgcgaggtgaccagcgtggccagagccagacgggtcttctcaccgccggaaagcacgtgagccggtttcatcgcgtcgtcaccggagaacaggaacgagccgagaatcgaacgggcctgcgtgttatcgagctcgggcgccacatgctgcaggttctccaacacggtggcgttcagatccaaggtgtcgtgctcctgcgcgaagtagccgatcttgcagccgtgaccgtattccacggaaccggtgtccggctcctcgatgtgggccagcaggcgcagcgtggtggtcttgccggcaccgttatagccgaggatcaccacacgcgagcccttgtcgatggccaggttcacgccggcgaacacgatgttggaaccgtaggccttggaaatatccttggccatgatcggcgtgcggccgcagggcgcgggctcggggaaacggatgtccgccaccttctcggccttctgcgcctcggaggtgttttccagcagcttttcggcacggcgcatcatgttctgcgccgccacggccttggtggccttggcgtgcagtcgaatgccttgcttcatgagacggtcggccttcttctcggccacttcgcgttcgcggcggcggcgctcctcgtccaccacgcgctggtgcaggtaggccttccagccaagcgaatacatgtcgatctggccgagctgcgcgtccagatgccagaccttgttcaccacttcgtccagcagttcggtggagtgggagatgaccaggaagccgccctcgtacttcttcaagtagccgcgcagccattcgatggaatcggcatccaagtggttggtcggctcgtcgaggatcagggtgtcggcattggagaacaggatgcgcgccagctcgatgcggcggcgctggccaccggagagcgtgccgagctgctgctccatgacctcctgcggcaggccgagcgaggcggccatggagatcgcctcggactgggccgcgtagccgccagccttgtcgaagtcctgcatggccttgtcgtaccgggtcatggccttgctcatcacgtccggatccgggtcggtcatatccttttcggccttgcggatgcggttgatgatggtggcgatgtcgcgcgcgctcatcatgcggtcgagcgcggtctgtgtgggatcggaggcatgcgtgtcctgcggcaggtagccgagcttgccggagacgcgcaccttgccggcggtgggcagcatgtcgccggtgatcacgcgggtcagcgtggtcttgccggcgccgttgcggcccaccagaccgatcttgtctcccttggccacatggaagttggtggggtgaagcagcgtgcgcgcgccgatctgaatttcaagtccctgcacctcaatagccatgaataacctacttgcctgttacgaatactgtctcttaccaaagtccgactgtccatcatagcgaacaccatgccgaccgggctcagccgacgctcatgcgtccatacgcagccgcgcaactgatcggcaaggtgaagaatgcgacgcccggtatggtgatcgcgaccatggcgcacggtatcgaagctgccatcgaagccgctgtgagcaccgaaaccgacgccaccgacatcatgggcgaaacccactaacgtacagacagcgatgcccccgccgacaacttctgtcagcgggggcatcgctatgcgttgaacgttacagttcgcgcaactgggcggcgatctggatggattcgacgctggcctcggccttgttgcgcgtctcctgccattcggtggcgggcacggagtcgagcacaatgccggcaccggcctgcacgctcgcctcatggtcgcgcaggaacgcggtgcggatggcgatggccatgtccatgttgccggagaaatcgaagtagccgacggtgccgccgtagatgccgcggtcggccggttccaactcatcgatgatttcgactgcgcgcggcttaggcgcgccagacagcgtgccggccgggaacgcggacttgaacacatcgaatgcggtcagcgaggggtcgaccttgccggtgaccgtcgagcagatgtgcatgatgtggctgaaacgcttgatgtccatgagctgcacgacttccacggactgcggcacgcacaccttactcaggtcgttgcgagacaggtcgacgagcatgatgtgctcgctgcattccttcggatcggcaagcagctccttggcgaatttctcgtcttcctcaggggtggcgccgcgagggcgggatccagcaatcgggaaggtcatcgcgtggccgttgtccaccttgatgagggtttccgggctggagccgatcacgttgaagtcgcggccctgagcgtcggtcaacgccatgaaatacatgtacgggctcgggttcagcgtgcgcaacacacggtacacgtcgaacgggtcagcaggcgaatcgatgtcgaggcgctgggagatgaccacctggaacacgtcgccgtcgacgatgtactgcttggctcgttcgacggcctgctcgtagtggctcttctcggtgcggaagcgcagctcgggttgggcgaccgtttcgtccaggatgttgacgcgggactcgtccggagccggggtggcggcatcgcgctgcatctggtcgagtcgagcgacggcctcgttgtaggcagcgtcggcgcgagtggatttatcatccacattcaccgcattggcgatgagccataccgaaccggatacgtggtcgaccacggcgatatcggtggccagggcaagcacggtctcaggctggccggtctcgtccggagcttcggcgcgcagggtcggttcccagtggcggatggcatcccagccgaccgtgccgaccagaccgctggtcaggttcggcaggccttccacatgcggggccttcagagtcttcaacgtggcgtgagcgacttcgactacgtcaccggtgacgggcacgccgaccgggaccttgcccagccagtcggcctgaccgttgttggagcgcagctgggccatcgagttgacgccgataaaactgtaacggctccacgtgccgccgtattccgccgattcgaggatgaaggtgccggatcggccgccggcgagacgctcgtagaagccgaccggggtgagcgagtcggcgagcagacggcgcacaatcggaatcacacggtatccggcgtcggccagttcgtggaactgttcgcgactgggccaggtggcgccccacttcaggtgtttgacgctgcattcgctcatattcgctcctttgcttacaactcgatgtcttgtttcatagtacgcggtcgctcggcttcccccagtcaggaaagcccgttctactgctcggccgggcgatggccttcgaccacgggcagggggccgccttcgaggaagcagctgcgcttgccggtgtggcaggcggcaccgacttggtcgacttcgacgagcagtgcgtcgccgtcgcaatccagggacacgcccttgacgtattgcacatggccggaggtatcacccttgcgccagtattcctgacgggaccgggaccagaaggtcacgcggccggtggtcagcgtacggcgtaatgcctcgtcgttcatgtagccgaccatcagcacctcgcgtgtgtcgtactgctggatgacggcggcgaccagccccttggcatcacgcttcaggcgtgcggcaatacggggatcgagttcagtggaattgtcgtatgtagtgtctgtcatacctatcttctttttgtggaccaccctcagtcagcttcgctgacagctcccggattatgtgcgacgtgcgcatagcgcattgccacgaacaattcactggattgttcgcccagcgggagcaaggtgtattcgtttagcgaacggtgtagccgtgcttcttgagttccgccttgacatcggcgatagtcaggatgccgtaatggaacacggatgcagccagcaccgcgtcggcacctgcttcgatggcgggcgggaagtcctcgaccttgccggcaccgccggaggcgatgatcggaatcttgacttccttgcgcacggcgcgaatcatctcgaggtcaaagccttccttggtgccgtcggcgtccatcgagttaagcagaatctcgccggcgccaagctgctcggcgcgcttgacccaccagatggcatcaataccggtggatttgcggccgcccatcgtggtgacctcaaaaccggactgcgtatgctgctcacccttttcgcggcgggcatccacggagagcaccagcacctggttgccgaaacgatcggccacacggctgataagcgacgggtcgttgatggccgccgtgttgacaccgaccttgtctgcaccgcagcgcagcagcgagtcgacgtcctcgggcgtgcgtacgccgccgcccacagtcattgggatgaacacctgttcggcggtgcgggagaccacgtcaatcatcgtgttgcggtgggagctggatgcggtcacatccaggaaggtgatctcgtcggctccctgacggtagtattcggccgccagctccaccgggtcacccgcgtccttgaggttctcgaaatgcacacccttcaccacgcgaccggcgtcaacgtccaggcacgggatgactcgtaccgccaacgacatgcttcactcccctgttcggctttgcattacagtccttcagactacctaccgcccgttacatgcgccgcacctgtttctggaatatgagaatcatcatattgagcaccgacatggcagccgctcggcgtgagagaatggctcgtggaagttgtccgccgaatcaaggagattggcatggctgtcgaaaacagcacggtactgatcatcgtcaacaactggggtatcgaggagaccgagctgacgcgcccgctgcgcgatctcaaggccgccggcgccaaggtgacgcttgccgccactaccttggacccgtgtgagacggtgcagcacgaccgctacgaaggtgaaacgctgaccccggacgcgcgcctgtccgacgtgcaggctgccgactacgacctgctggtggtgcccggcggcacctgcaatgtggatcgtatccgcgtcaatgaggatgcgatcacgctggcgcaggagttcgcgcacgaaggcaagccgatcgccgcgatctgccatggcgcgtggctgctggtcaacgcgggtctggtggctggcaagaccgccgcgccctgccgctatatcgccgctgatatcgagaacgcgggcggccattacgtcgacgagcagctgcacgtggacgacgccaacggcttcaagctcatcacgtcccgcaagcccgacgatctggactacttcgtggacgcaatcaaggatgcgctgaagtgacggaatcgccgcaggccgattccgtcaccgaaactaccgctccttggcagcaagctggccgcaggcgccgtcaatatcctgaccgcgggtgtcacgcagtgtggcggtgatgcccgcgcggtgcaggatctccaggaaccgctgttcgtcttccggcttggaggcggtccacttcgagccctcgatggggttgagcggaatcgggttgacgtgggcccagttgtcgccgtaatggttaagcctcttggccagcaactgcgcatgctcggcctggtcgttgatgccgcgcatcagcgcgtattcgatactgacgcggcgcttggaggccagccaataatcgtgcgcggcatccaacacctgcgcggtgttgaaacgcttgttcatcggcaccagctcgtcacgcagttcgtcgctgggggcatgcagggaaacggccagacgcacgggaatgccttcggcagtgagcttcttgatgccggggaccacgcccaccgtggatacggtgatgttgcgcgcggaaatgccgaagccttcgggaggcatggcggaaatctgtcgtacggcggacagcacggagttgtagttgcccatcggctcgcccatgcccatgaacacgatgttgctcaggcggccctctcccccggccacttcgccgtcgcgcatcatcttggcggccacacgcacctgttcgattatttcaccggtggacatgttacgggtcaggccaagcttgccggtggcgcagaacgggcagcccatgccgcagccgacctgcgaggagatgcacagcgtggtgcgggtcgggtatcgcataagcaccgattcgatgagggagccgtcgaacagcttccacaaggtcttgatggtggtgccttcgtccgccacttggcgggtcacctcggtgatgagctgcgggaaaaacgcggcggcggcctcgctgcgcttggctgccggaaaatcagtgaattcggcggcattcacatcgaaatggccaaagtaatggttggcgagctgcttgactcggaacttcggcaatccgagttcggccgctttctcgacgcgctgctcgggcgtcatatccacaaagtgcagcggcggcttaccacggcgggcatggtccttggatagcacgtcacggaaggcacctgatgtgccgccgggagtaatgccggtttccggagtgtcaggatgctgtgtggtcatgatgggttcgcttcgctctcaatatcagaaaatagtcaaacatgcaatagaaatatcagaatccaccatacggcgtgccgcatacgaatcagatggcccatgtcttagcccatagcgaacgcatattgaacgatgatttccccatatatgacatgtggcaccgtgcgatatacacacgatgccacattgttcgtgcacgaggcatgcgaatcacagtccggtgatccacagcaaggcgcaggtgaacggtgcactcatcaaaatggaatccacacgatccatcacaccgccgtgccccttgagcagatggcccatgtctttgataccgatatcgcgcttgagcatggaagcacacaaatcaccgaacgtgcccacggcaccgatgagaatacccgccacgatcggcacccaccaacgagtggcccatttcgaggcatcatacgtgcatgcgaatacggcaaatgcgccagccatggcgaagagcatcgagccgataaggccctcaacggacttcttcggcgagatgcgcgggctgagcttgtgtttgccgagccaggcaccggcaaacaaaccgcccgtatcggatagggcgggtaggaacaccagcatgatggcgtgtgcaatcggatgcccattaaaagtcagtgagatgatgacgcagctggccaacaacggaatgtacaacacggtaagcacggacacagccacatggctgagccgggaatgatgctgttcccctccctcatgattaaacgaggattcaaggcgcgcgctggcatccgtgttggacagtttgccggcaaccgccagagataggcggttgccgacgctgatttttgcgctggccgcgatggcgaccagaataatcgacacgatgatactcagcgacatcgtgatgagatggtacggggaatagtaggtggcgatgagggtgaaggacgagcacagccacagcataaacaccgggaggtgcaggcccacggtggcgaagtccaccctgagctcccacagcgccagaatcatgaacatgactaccagcagcacaaagaggtcgacgctgagcagcaggcacgcgacaataaggatgaccagtgccgcgcctgtggcgatggcctgcggcatgttgcggccggtcttcttgttgatctggtcgagcgtctcctcggcctcttcatggagttgttcgttgcgttccataattctccggacctgatctgaatcagacctccatgatctccttctgcttggtctccagcagagtatcgatctcgtcggtaacggacttggtgaccttgtcaagatccttcagcaggcgatcgccttcgtcctcacccatctcgccgtccttgacggccttgtcgatggtttccttggtcttacggcgaatgttgcgcacggcgaccttgccatcctcggccttgcccttggcgagcttgacgtattccttacgacgatcctcggtgagttccggcatggtcaggcggatgacgttgccatcacggttcgggctgatgccgaggtcggagttgcgcagggccttttcgacggcaccggcctgggaagcgtcaaacggggtgacggacagggtgcgcggttcgggaacgccgatggaggcgacggccttaatcggggtgggggcaccatagtagtccacggtgatgccgttgagcagggccgggtttgcgcgaccggtgcgaatgccggagaagttttccttggtgttttccacggtcttggccatctgttccttggcctggtcgataagagacatattcactccttgtgtgttggtgttcgtcagtgttgttcgtctatgaacgcttgattcgattgtgggcgtttgcggcttactcggccacgcgcgattcggcggtggagaccagcgtgccgatttcatcgccgacgagggcgcgggtcacgttgcccggctcttcgaggccgaagacgcggatgcgcttcttgttgtcgcgggccatggacagtgcggaggcgtccatgacggccagattgtccacgagggcgcgattgtagctcagggtttcaaaacgcttggcgttctcgtccttgcgcgggtcggcggtgtagacgccgtcgacgccgttcttacccataagtacctcgtcgcagtggatttcgagggaacgctggatggaaaccgtgtcggtggagaagtacggcatgccggcaccggcgccgaaaatcaccacgcgacccttttcaaggtgacggatggccttgagcggaatatacggctcggcgacctgtcccatggtgatggcggtctgcacgcgggtggcctgcccctcctgctccagaaagtcctgtagagcgaggcagttcatcaccgtgccgagcatacccatgtagtcgccacgggaacgatcgataccggcctgctgcagttcggcaccgcggaagaagttgccgccgccgaccacgatggccacctgcacaccctgttgtacggccggaacgatctcctcggcaatgcgacgaatcacctgggtatcgatgccgaccttgccaccaccgaatgcttcgccggacagcttgagcagaactctgcgcggattgtcgctatcagtcatattgtgcctttctcaaaaccgaaagtgcgaaattatccgtagacaagcgtatcggtttacgacgacaccccctagcaacgacacccttggaatagcgaaacgccatccgattattgaataaccggatggcgtttcgttgaaattacgctaagcgcgtggagtaagccttaggctcactcctcttcgcccttgccgacctcgacacgagcgaatgcggtggcgttgccaccgacttccttgaacaggtcgccgacggtcttggacgggtccttgacgaacggctgctcaagcagcacgacttccttgaagaaagcgttgagacggccttcgacgatcttcggaacgatcttctccggcttgccctcggccagggacttctcggtggccacgcgacgctcggactcgaccacatcggccggaacgtcctcgcgggtcagccacttggcgcccatggcggagatctgcagagcagcttcgtgagccacggcggcgccggccttgtcggtggcgatcatggcgacgatgctcggcggcatctcggcggacttcttgtgagcgtagacttcgacgtgctcgccggagatcttggcgaactggccgaccttgacgtgctcaccgaacagggcggcggcctcttcgacagccagcttgacggtggtgtcgccagccttggcctcgagcagctcgtcagcggagttggcgtcggcgtccacggcgtagccgagaacttcctcggtgaactcgacgaacttcggggtcttggccacgaagtcggtctcggagttcagctcgacggcgtagccggtctcgccattggcggtctcgacgaccttggaggcgatggtgccttcctgagccttgcggccttcacgcttgccggctgcggcgatacccttggcgcggatgatttccttggcgcgggcgacgtcgccttcggcttcggtcagagccttcttgacgtcgagcatgccggcgccggtgtcttcacgaacctgcttgatcagtgcggcggtaattgctgccattgattattctccttgagaaattttgcttacccatgaacgatgggaagcgctcattcaggcacttcccatcgtagagcatcactcggccttgggggcctcggcggtttcgccctcggcggcagccggagcggcggcttcagcggaagcctcggcaggagcctcgttggtcaggagttccttctcccaagcggccatcggctgctcggcggcttcaccctcggccttgttggcgccggagcgctccagcagaccttcggcgacggcgtcagccatcaggctggtcagcagttcgatgccgcggatggcgtcatcgttggccgggatcgggtactcaacggtgtccgggtcggcgttggtgtcgacgatggcgacaaccgggatacccagcttgtgagcttcctcaacagccagggcttccttggtgatgtcgacgacgaacatcgcggacggggtgcggttcatgttgcggataccgcccagctgcttgttgagcttgtccttctcgcgctcgagcaggaggagctccttcttggtcaggccggaaccgtgcacgtcggtgaagtccatttcctcaagttccttgaggcggttgacgcgcttggagacggtctggaagttggtcagcatgccgccgagccaacgctcggagacgtagggcatgttcacgcgggtggcctggttggcgatagcttcctgagcctgcttcttggtgccgacgaagagcacggtgccgttgtgagccacggtggtcttgatgaagtcgtacgccttgtcgatcatgtcgagcgacttgaacaggttgatgatgtggatgccgttgcgctgggtgaggatgaactgcttcatcttcgggttccaacgacgggtctggtggccgaagtgcaggccagccttcagcatatcgctcatagtgatctgagccatggtattactacctttcattgtcggttcttgcctggccatgcgcacctgcgtgcagctgctcccccggtttcacgagttgtgcagccgaccgacacaagccgtcgcgagcatgacgcgaatttgttgtgtgccggttgacaatattgggtggctctggacgccagcgactgcgtccgttgccgggtggcacacgagtttcgagaatagcacggagccggtactaaaaaaaaacaggctcccctctctgaggggagctgtcgccgtaggcgactgaggggagttacgggcggtaccggcagaaccaccctcagtctcactacgttcgacggctccagccagtgggagccgagtatggactacttcgcctgacgattgcgcatgtagcgcagggcttcgcggcgttcttccttttccaggcgatccaaatacacgtggccgtcgaggtggtcgcattcgtgctgaagcatacggcccatcagcccggagccctcgagcacgacctcgttgccgtccaagtcgatgccacgcacgcgagcgtagtcggcacgacgggtcttgtaccacaagccgggcacggacagacaaccttcatcgccatactgctcgccggacttctcctcgagtacggggttcagaacgtagccgaccttgccgtcgatgttgtaggagaaggccctcaggctcacgccgatctggttggcggacaggcccgctcggcccggatcgtccacggtttccaacaggtcgtcaaccaggcggcgcacggccggggtgatttccttgatctcatcgcagggggtgcgcaggactgggtcgggcacgaccctgatctcacggatggccacttctcgttactcctcattcttctcgtcagccggctggtccggcttgctgccggtgtcagcggcattgtcggcattgtcggcattgtcagcggaatcgccggtctcgccctcttcgggttcggccttcgacttcttgatcttctccgacacgctagcaatcgaatcagacacgctggttttcatctgttccgaggcctgtttgacctgttcggacgcctgcttgaccgattcggaggatttcttgacggtctccagcgtgctgtcgatgatcttggcagtggcgggcagcggcttgttggatggcttgggcgcgtacagatcctcctcgatgacggtggcgtagcgctgcaataccttgggacgcaccactttcatgctcggggtgagtgtgccgtgctcctgactgaattcctcatccagcaccgcgaatttgcgcacggactcagcgcgggagacattggcgttggcctggtcgatgtactgctggataaaggcgcgcaccgcgtcgttgtcgctggcctcggcgagtgtcatgtcggcattgaggccctgaccttccagccaggaatgcagcatttcggggtcgagctcgataagtgcggacacgaacggcttgccgtcgccgactactactgcatgagccacgatcgggcaggtgccgatgacatcctccatcggggcggggctgatgttcttgccgccggcggtgatgatgatgtccttcttgcgtccggtaatgaaggtgaagccgcggtcgtcgatacgacccagatcgccggttttaatccagccgtcggcagtcatcgtctgtgcggtgagttcgggctgcttgtagtagccaaggaacacgttcgggccggtcagctcaatttcatcgtcttcgccaagacgcacgcccatgccaggcccaggcttgccgaccgaaccgatctcgttgtcgtcctcccaattgacgagcatcggagcggcggtttcggtcatgccataaccctggatgaaggtgatgtcattcatgccgttgaaaaagtgggccaaatccacgttgagcggcgcaccaccgcaggccagccatttgaggttcggtccgagagcggaacgaatggatttgcccaccgtggccatgtagaacgaatggcgcatgcgctcgatgaacgaatggccgcgaccggcctgctcatccttgctccacttgacgaagtgcttgaccgactgggcgaagatatgcccctggatgccggcaccagccttctgcgaggccgcgttatacaccttctcgaacacacgtggcacgcccagcaggtaggtgggcttgaagctgcggatatcggcgagcagtcgcttggcgtcgggaatgtatccgaccacgccgcagccaccgatgcacacgtactggatgtagcgggcgaagcagtgcgccagcggcaggaacagcagcagacggttgtcgtcgtacagcatgccacgcagaatctcgtagccgttaagcacgatgtgcgtgtaattgcggttggagagcatcgcgcccttgggcttgccggtggaaccggaggtgtagaccacggtgagcagatcatcggctttgatacgagcgatagccgcatccaacgtctcatcggatacgccatgcccgaagtcaacgacagcgtcaaggccatcggccttgaaattgaacacgtatttcatgcccggatgattgacacggatctgctcaagcgtctgtgcgcgctggaagtcgccggcaaaggcgatggcgggatcgacttcctcgacgatgcccgcggtctgacgggcggaatcggtctcatagacgggcacaaccacagcgccgattgccgcgcaagcgaaatcagccacaccccactcatagcaggtaggcgagtaaatcagcaccatggtgccggctttgacgccaagtcccaacaggcccttggccacctcgcgtacgcgggacagcatttcagtagctgtggcgctgcgccattggtgggtgttgtcatcctgccattccgcgatgatgtcatccggcgtgcgagctgctcgtttggacagcagcgagtagacggtgtcgtcatcggtggtgacatatctgggttcttctacatgttcacgcatggtcactactataggcgaaccagcctatgacacggcagaaccgtcttccgctaccagcgtaggaatcggtgtgcgggcggggccgtctggtcagcccaaatcggcatagatgcacatccatcgagaaccgatgtacttcagtttgaggttgactcgcagattttcctggccgatggtcatgaataccgccatttccagcgtgtccttgccggtgatcatgccgtcgatcaatgtggggacagtgggcagatagcagaatttcgctttgagctccggatgagtgaccatgtggatgccgagcaggtattgcatggtttgcagccggtccaggcatggttttgtcatggctctgttgagatgtgcgacgctgagtttgccacgtatcgcgtccgccgatgtgcaggcgatgcggcatgcagccatggccatggaatgacattccttcgcattcagcccgcctatgaatgtgggttggatgtgataccgcaccgggcgatccgacagctccacaacgatgaatccgtcataactcggcaacggcccgtactgatatgtgccgtggaaaaatcccgaatactccatgatgacccccttcaagcccccttgcaactcaccatcatcggcgagcgtctgtactacaacatcacgaaaggcgcgccaagtcaaactacttgagcgcgccttcgggcaagttaagcctcctgcatggagggcaaacccccattttcagggggcaatcgggattatcgtgcggaatacgggttgaccaccatgccgcaacgctggaagttcttcacgtcgacgtagccggtggaggccatcgcgcgcttgagggcgccgatgaagttggtcttgccgtccgcctggtggctcggtccgaacagcacctgttcgagcgggccgaccgtgccgaccgtggtgcggtagccacgcggcagcgtctggtggcgggcttcagaaccccagtgggtgcccttgccgggggcctcggtggcgcgggccagcggcgcgccgagcatgaccgcgtcggcgccgagggccagggccttgacgaagctgccggagtcgcccatgccgccgtcggcgatgacctgcacgtagcggccgccggattcgtccatgtagtcgcggcgggcctcggccacgtcggcgatggcggtggccatcggggcctgcacgccgatggtctggcgggtggcggagaccgcgccgccgccgaagccgacgagcacgccggccgcgccggtgcgcatcaggtgcagggcagcggtgtagttggatgcgccgccgacgatgacaggcacgtcaaggtcgtagatgaacttcttgaggttcagcggttcctggccggaggagacgtgctcggcggagaccacagtgccgcggatcacgaacaggtccacgcccgcgtccaccacggtggagtagaactgctgggtgcgctgcggggagagcgcgccggccacggtgacaccggcggcgcgaatctcgtgcagacgttgcgtgatgagctccggcttgaccggctcggcatagatctgctggatacgctcggtggcctgatcggccggcagtccggcgatttcgtccaacagcggggtcggatcctcgtaacgggtccacagaccttccagatcgagcacgccgagcgcacccatcttgcccatggcgatggcggtggccgggctggtcaccgaatccatgggggcgccgatcaccggcacatcgaactcataggcgtcgatctgccaagaggtggagacgtcctcggggtcgcgggtgcgacgggaggggacgattgccacatcgtcgagtgcgtagccgagacggccttttttgcccaaaccgatttcaatttcctgagacatggtttccagcctattgcccgggtgggacgccaacaaggccgtttcccacggaccggacgattgcttcaagtcgttacaaacatgcgctatgactaaatcatcttcacaccatctatcaggaggaagcatggccaaaatcaaggtcgaaggcactgtcgtcgaactcgacggcgacgagatgacccgcgtgatctggaaggacatcaaggatcgtctgatcctgccgtacctcgacgtgaacctcgactactacgatctgggcatcgagcaccgcgacgagaccgatgaccaggtgaccatcgacgccgcccacgccatccagaagcaccatgtcggtgtcaagtgcgccaccatcacccccgatgaggcccgagtcaaggaattcggtctcaagaagatgtggaagtcccccaacggcaccatccgcaacatcctgggcggcacgatcttccgcgagccgattgtgatgagcaacgtgcctcgtctggtgcccggctggaccaagccgatcgtcgtagcccgtcacgcattcggcgaccagtacaaggccaccgatttcaaggttccgggagccggccagctgaccgtcaccttcactccggacgatggctccgagccgattcagcacgtggtctacaactacggcgaagacggcggcgtggcccaggtgcagtacaacgtcaacgattcgatccgcggtttcgctcgcgcctgcttcaactacggcctgatgcgtcattacccggtgtacttgtccaccaagaacacgattttgaaggcctacgacggccagttcaaggacatctttgccgaggtgttcgagaccgaatacaaggacaggtacgccgaggccggcctgacttacgagcaccgcctgatcgacgacatggtggccagctccctgaagtggcacggcggttacatctgggcctgcaagaactacgatggcgatgtgcagtccgactccgtggcccagggcttcggttcgctgggcctcatgacctccgtgctcatgaccccggacggccagaccgtcgaggccgaagcggcgcacggcaccgtgacccgtcactaccgccgctggcagaagggcgagaagacctccaccaacccaatcgcatccatcttcgcgtggaccggcggccttaagcaccgcgccgatctggacggcacgcccgaagtccgtcacttcgccaagacgctggagaaggtcatcgtcgacaccgttgaaggcggtcagatgaccaaggatctggccatgctcatcggcccggacgaaccgtggctcgacaccgacggcttcatgaacgcgctggacgagaacctggccaaggctctggccgagtaaatcatcgaacacatcgtgcggacctacatgggtcatgtcatgtcgcaaactgtcatgattgtcgtgcttcatctggaatgttcctcagcacgataatcatgacagttgttcgatgcacgcacgtaatacctctaattgttcccggatatgtggcgatttgtccactggtccgggactttttcgtatacggcctactagaatcgtgattcagcttgttttcacgcccgcttgaggaggtttcgccgcttatggtgttcgcacgccgctcaaccaccctgctcgccgccattatcgcatcctgcgcgatggtgctgtcactgaccgcgtgcacctcagacaataagaccgttgtagatggtcaaaccacggtgacgtccaattctgccggcggcgtggccgtgttcacaccttcggacggcattacgctgaaccagcagacgccactgaacaaatgggcgaagctggtgcctgacctagccaaggctctggccgacgccggtttcaagaaaggcgatatcaatcatacgacgtccgactcgttggataagcaaagccgcgccatccaagactttgtggtcgatcatctttcgaataacaccacggacgattccggcattgccatcgcgcccgacaacatgacattgctcgtggctccagtagtcgaggccgacgcttccactcgccaatacggcgattacgtgagccagaacctgagcaccaacgatgtcacggatgagggagctacttctgacggtgaatcttccgaagacgactcgtccaaagacgactcgtccaacactgagagcgacagcactgcatcggacgagcaggcgcaggccgtggaccggctggtctcatcgctcaagctggccaaggaatccggcatgcatgtggtattgctcggcaacagtatcgagggatataagccggacgccttcgtcaagttctcggacgcccagaccatcggcaagctacaggcggaaaagatggtgtccaaactcaagttggataaggccagtaaagacaaccccaaatacattgaggtgctgctgccatacaccgccatggacgaaaaaggcaacgccaacgattccacgttcgcccaagaggcgttccgtggtatctggcaggtactgggctcctactatcagaagggcgttgtggaaagcccttcaggcaccttggacggcaaatccacggaaaacgattggcaagccgtggcctacgatgccgctaaggaaggctccactgcgaaagtgcttgacaagcgtctggcaaaaaccgacggacagtccacactcacccgtattgacggcatcatcacgatgaacgactacatcgcctccgaggtcgtcaaggaattggacgatctgggatacaccggctctgccgccgatatcaatccgcagatcaccatctcgggcattgtcggcaatatcaccggcaagaaggatctcagccgcgacgccgtgccggacccgatcaaatcccctgaaaacgacaacgcaaacgactcatccagttccgatgacgatgcggacgaggacacctccgcttccgacaaggaccgtgactcgcagtggcctctagtaaccggatacggcgcgtatgtctcgaacatcccatccatcgtcaatggcaagcaatggatgaccggcatggaagacagacagaccatcgccacggatatcgctcaggcctgcgccaagctcaacaaggacgaagcgctgaattccatgccttcaatcaggaactccgaggtaggcggcgtgaagaagatcccgaccatcagcgaaccgttgctggctgtcagcgccagcaatctcaagtccgcgctgatcgaccccggatatatttccttggccgatgccggtctgtgattcatactcgtcacgccgctagccgcctgcgatgtctcttccgtacggccctgttccggccgacaatcaccgttaaatcatgacggtttcagtacgatttttcgactccccgcatattgctgtggatcaagataatcggccgttcctcgcttgaggccccaatgcaggcaacggtcttcgcaatggtccgagctgccttcaacgatgcctacgggctgtctgcgggagatcgtatcccccactgagagctcggtaacggccggttcgaatgtcgacgtgacacctccacgatgccgtacactcaccacatctttgccagctactttgccagcaaaactcacggtccctgcctgcggtgacagaattacggtaccttgctccgcaacaagatccactccacgatgacctggtgcccacgggttgatcggccgctcgaactgttgttcgacctgtggatcgtcgaccggccagtcgaatcgggattcgcactgattgccattgcgccacgccaaatcagacatatcggtgaaatcctccaccgtgtatgccgcatctccggtcaccgcagtatccgcatgcgcaacatgctgaggcgtggatgccagccctactcccaaggcaagcagcaggccgataacggcggccaacgcgattatggcatccatacgccgttgccgttcctgagcccgctgacgcgcctgctgacgccgccggctggcacgtcgggcttcgtcgcgacgccaatcaaacaacagtggtgcattcatgagattcctccccatagtgtgagtgtgatgtgattccggcttctttgccggtgatacccaccttgaggggtccgaaacaggatgtccagccaaaacgacctatgtggttctagcttccgaagttatccacaatgaaatttcgcgtgacagtatcgccgcatcgtcatgttgttcgaccttcagccgcggccgatccatgtcacaaccgctgccatgcagtgacagcggaacatcagaactcttgtgattgttcccactgggttcgcatactcagacggttgttccgtttcaccgattccagtatttgccaagcagacaccagctcctctaccgttagtcgctagtgtatatccgcgttcggtttttggctgtatgagatagtattcgatgagtccgattctgcggaattcagcgcgacatgccctacacgcatgtaatttgctttttcgtggcaggcatgtaagatatgtgacttgtgcgcgagagaaatctcaaacacagcagacattcctgcgtagctcagttggcagagcatccgactgttaatcggacggtcgctggttcaagcccagccgcaggagctcattggaagccatcggcgtgttgccggtggctttttctgtatttatatccatgagcatctgatcggctttcttgtttccgagcatcatgcgcataatcgcatcgttagacagttcgtccaccgtagtgtcaagatattccgcagccaaaagaacctcttcaaatcgccagtttgcgcgagagatcttgagggacataccggaaggctttatcccgagatagcttgccatctcagtttgatttttgccttctctcgcttgtgcggccagaagctgctgaacgttgaaagaaacgacttttaacttgtatgcggctcgcgccttggggctgacgcccggcattgtttcaatactggtcatttttaacctttacaacaatatgtttacctgttgcaaaatatattacctctcgatttgcgtttagtgcaagtttgtcgtacactttttgcaggtcgtaaaaagtattacaaaaatggaggctggaggtgtgtacgccgatgaatgattggttcaaagaacgcggtatcggccaagagcaggtcgccgccactcttaacgtttccgtctcgaccgtttcacgcatcgtcaactacaaaagagacctcagcatgaggcgtgcgatgattctgcacactgagtatgggattccttttgacgttatgtatccatctcaattgagcgagggtgagggggtgtttgtccgataaggaaatgcccggtctcgatctggaacatcgaaaccgggcgtatgcaacacatccaatgttgaacgattccctagtcgccaaacttttgaatcgttcgcattgccttttagattatggaggctgcacaaatgtctagtgtaaccgaagtcgctgtgccgacttctgattttgatggtaacgcccccgtgaatggttcgcggtgcatggcgtctacattttccgaatccctgtattggcggcgttctgcccggcgctacgagctggcgggtcttgccgcttggatgctggccgcattgtcgtgcgtggtttttctggcgattctgcttgccgcgaggaatctgcttctgccgggattcgctttggtgccggtggcctgcggcctggcttgtgtgggttgctggtgcgaccgtaactcgcgcgatgcctgggatttcgctttctggtcccttcacgtggaggtgaggcaatgaccatgaccgttggcgcgcgttccctcgataacgaggagcgctcgaatttccgggactatatgtccctgttgtccctgtccgtggatgcgtcgatgaccgtgagggaggtcatggcggtcgcctatctgatcggccggcgtgacgcgcttcgtgacgtgcggaacgcttcgtcgtcggctcggacggtgaaccgtggcctgatccatggcggtccgtcggattgcgtgttcaatcgcggctacgaggccggtgcgggcatggtgtccgacgagatcgacgcgttgatgcgcgacgtggagtccctcagcggcgatgacgcggtgttctcgatgctcaggcatccttcggtgagcgggggtgatgggtggtggaattggtgatcctgctgttcgtggtgcttgcggtggcctgtttcggtctgctgttgccgttcctgcgtctggccgtcggcatcgtgcttctcgtggtccgtctgctggcctccctcgcgcgatcgatgggggcgggccgatgatgcacctcatactcgtgatcgccgtcgttttcgttttcgccgcgtcctgtctgatgacgttcgccctgtgccgcgcggccacgcgccgcgacatgcttgaggcccgttggcgtgaggagcgggccggttccgtgagtgaggagagccatgagagcgcatgaaacgcttgagcgtgccgggcgtcatggcggcttcccggcccgtggttccgcttcgggcctgttggcggcctgcccgtcggacggcagccacgacttctacctgtcgatgatgctcgacgttcccgtgccgcgcgtgcccatgctgcgcgcacgtctgcaagactcccgccgagggggtgccgcatgagtgtgaacgcggtcgattgggcgctcaggttcgcgcccgtggacgccaggcataacggtgccgcgcgcgtgctgatgtgtctggcgaacgtggccgacgacgaggggcgcaacgcgcatccgacgcacaggaagctggccgcgtggtgcaagtgcagcgtgagcacggtcaaacgccacctgtcatggctggaagcgaacgggctgatccgtcgcggcgaccagcgccaggccgggcatttcagcgagtggcaccggcccgtcgtgtgggatctgtgcctggggaaccgtctggatctcgaccccgacttcttcgactcgaacgacatcgacgcgacccgaggaggacggcccgcgacggaaagccccggcccacacgtgaaccctggttccgacacggaatccgatgataaccacggctcacatgtggaccgtggttatggcgacgggggcacgggaaaaccccagctcacgggtgaaccacggttcacagctgtgaccccacccccagctcacctggtgagctacagtacgtccctagtacgtaataacccctctgcccctacggggcatctccccgcaagcggagagacctccccggacgatgacggaatccgcgaggacggttcatgggccgacgccgccggagccgaacccccaagcagcgaatccgccgaggccggttccgacgcggaggcggtgtgccgcacgatggcggacgggctgcgcgccatgccgccgatgccggttcccgaaccgttggcccggcccggcaaacgcgaactcgacgccgcccgacggctgatcgcccgccacggcatgccactggtgctggccgtggccgaatgggcgtcgctgccgccttccaagaccgacaagggcgacgcttccggcaaaccgtatgacggtttctggcgtcgcacgctcaccggcccccgctccctcgcacggcactgggaccaggtatgcctccagatggccgacgacccccacgggcgtcgcctgctcgccgaacacggcatcctcgccgacaagggcgaaacggcgcagccgccgagcgcggaatccacgccgaaggtgccgaactacggcatccccgacaacctggaccggcgcgtgtggaaactgctcgacccttacgacttcgatgcgggcaatgacgggttcgaggcccaacgcaccctgcgtcggatgttgaagcgcgtccccgcgaacgacgcagaaggcgaacgcaatgccgtgctggaggcattgcgggcgggccgcgccttcctggacgcggaatccagggagaaggacgacggcttcgggcggcggaagccggctgggaccgggccggcatccgtccgtttcggcttcatcggcggccgtgggccgaaggaggtgccggcatgttcctgaaaggcgaatgcgcggatttccccgactcgtggtcggaccgcatgtgggggcccgacgaccttcccaaccagcgaacccaatacgagctgcgccgcgcggcggtgcggatctgcgaggcctgcccggtcagggccgaatgcctcgcgttcggcatcatggtccgggaccagtacggcatctacggcggactgcccctgcgcgcccgacgccaggtgctgaagaccgcgcaggaggccggattccggttcgaccccgacgacccgaccgccgaacggcggctcgcccggtacatccgcgagaaccccgagatcgtggcggcggcacgcgaacgcgaatgcaaacgccgcaagaccgagcagcgcaacgcgcgccagcaacgatggcgcgccaccacacgctcgaccggcaaggcgaaggccccggccgccgccacacacaccccgcccttgcaggacaccctcttctgaagacaatccgatacagataaccggtccggccccataaggacgaaccattccggaaacccgtatacgcggcaaaccgtggaaccgtgcacccgtggacacgggaagccggaaacccgaatgaaaggaacaatcccaatgaccacgaacacgaaaacggtggccttcgtcaacctcaagggcggggtcggcaagaccaccagcgccatcggcaccgccgaagcactcgcccgactgggccataccgtgacggtgcgcgacgccgacccgtccggcgcggcgaccctgtgggcgcacaaggccctatcggccggccgcccactgcccttcggggtggaggtcgtcaaccggttcaccgtcgccgcgcccgccgaggaggaatgggtgctgatcgacacgcctcccttgcagaccgatctggtggaggcggcggtggacgcggccgacctcgtgctgctcgtcaccaccaccggccccatcgacctggaacgcatgctggagaccatccggcagatcaacaagccctcctcggtgctgctgacccagacccgctacggcacgcgcagcctcaggcacgccgaggagttcctggccgagaacggactggcccattgcagggagaccatcccgtacaaggaggccatgcgcctcgcgccggacgagggccggttcccgtccgcctcgggctacgggcttatcgccaaggaactcagcgacgcattcaacgcctgacacccgcagaaccggaaacccggaaacccgtgtccacgcaaacccgtggacacggggacacggaaaggaacaacatcatggagatcaacaagccgatgaccacgaggaacatgctggcatcgaccctcaccgactacaagaaaccggtcaagctgcccaagatcacggtggagctcgaccccatgctcaagaaacggttcaaggccgaggccgtgcgacgcggcaccaccatccgcgacatgctcacggcatggatcgaatgcgactgccctcccctcgacgcggcggacgcaagggccgaggcgaagcaagacggaagaaggagtggatgatgacggatgacatcgaggagcgggccgcactggcccgtcgcggggtcatggaccattcggattgcgaggagtgcacggaggactggacgttcctgatgcgtcagggacggcgggagttcccgttgggattgcgcacggtgcttgcgtgcctcgcgttcgccgaacgcgagggcgcggtgcccgagctgccggcggattggtgggttagaatcaacaggaggtatcgatgacgacgatgcgcggcgaggggagccgactatggatgtgttcaaggcatggccgggaagggcggaaagcatcgtgatcagccaggagtcatacatgaggtgcaccggcggcgtggccccgtggcgtcgtgacggcgacaaggggccgtcctactacgcggtgtgcccgctgtgcgacaatcccatccagattgtcggcctgttccgtcggcaggaggaaagccgtgcgcgtcggccctacgggcgacaccaccggggcgatgtgccgggcctgtgccgctacgacgaggacgcctatctgcactgcccgtatgcggatccgaaccatcggacggacatccgagcgagacgtcatccgaaggaccagaccgggcgggccctgtatggtctcatgcgcggcgagttcgaccgggtggcgctggcgtgggaacggttctccggcatccatctggggccgggggccgcccgtgacatgcttcgcaaatggcgggacgaccagggatggcgctactacgacgcgacctacggcaatctgccgcagatgctgttcttcgcggccggcggacagaacctggtcaaacgctacatcgtgccggacagcccgttgcacgaacggctgaaaggcgtgccgcgggtgagattcacgccgacgcgctcccggtacgtgcaggtggacaaggccgggccggggttccttactctggatttcctgctgtacgcccggcgcatcgaatgggacggacagcacatgaacgagacgttcaggctacgcggtctgctgggccgcgatgacgggcaacaggccttcgatgacctgaccctcgacgtcgatcaggactggctcccccacacagcggacgcccagcccggccgcgacgagcggctactcgacatcgcgcgggaaacgctgcaatccgacgcgggtgtcccggcagatcaataaagcgttatcaatgcaaggagaacaatgatgaacgagaacgacaagacggaaatcctcgaacccgtcgagacacccgccgagaacatcacagagccaagcaaggatggaaggaagtgtccgaagtggctgccgcccctggtcgcggccgtctgcgcggtgattctggtcgtggccggcatcatcggctggaacgcttacagcggcgcgaagctcgccgaggccaaggaggcgtgcgccaccgccgccgacaccgtgcgcaacaatgccaacgagtacaacgcgctgctcaacggcgatgccgccgatgccgccgccgtcaaggccgaacaggtcaaggactcgaagaccgtcgaatccttgggcaaggagctcaaggccatggcacccgaatacgagggctgcgtggccgaaaacgcgcaaggactggatgccgccgccgtgaagctcaatgaacaggccgactggtacgagacccacgagaagagcctgtcgaaggcggtgagggccgtcgtcgaatccaaggccgcgaagaggctggatgacgcgaaaacgaatctgacggcgaagctggacgaggcgtcgaagctgctcgcggattcggacggcaaggtcgcggacaacgccacccgcgacgcattgtcgaacgccatcgacgcggcgaacgggctgaaggacgggaacgatccggcgaagatcgacggggcgcgcaaaacgctggaggatgccatcaacggcgtgaacgcgagcgtccagggtgtcgtctgtgaggcttgttggtggctgccgggccaaccggtggctacctcccgttattcctgcggtcggaagccccgccaccctttgaaaaaaggcggcggggccatgaccggaacgattgaggggaggggatgaacagacaaggttaacggaggttcatttaacggtggccttcgtcaacctcaagggcggggtcggcaagaacaccagcgccatcggcaccgccgaagcactcgcccgactgggccataccgtgacggcgcgcgacgccgacccgtccggcgcggcgaccctgtgggcgcacaaggccctatcggccggccgcccactgcccttcggggtggaggtcgtcagccggttcaccgtcgccgcgcccgccgaggaggaatcatggagatcaacaagccgatgaccacgaggaacatgctggcatcgaccctcacggactatcggaaaccggtcaagctgctcaagatgcgaggagatggagcgccggctctccgacatacgcaaggcgaacggcgggcacatgttcgccggggcgagggcgggatcatgacggcccaggctccctgcgcgaagatcgcgcggcaagacccggacctcgcggatcgcatgtgggcgaccattacggtgggaggccgtgaggtcgtcgatgccgagaagcgcgcgctcgggcgcagggtgtgcgagacgtgccccctgcgaaccacctgcatcgccgacagtctcgtcggcggatggaaggaccgcaacctcataggaggccttgactacaggcgtcgcacagtactctcgaaactggtctgccgagacctcggcatcacggcgcgccagctgcacgacatgcccgcgcaacgggtgagcgactggcttgaaaggcatccggactgggccgaccgaaccagactggcggactccagcgactggcggcagcgcaagcgcctgcaacgtcgcaaacgtgaacgcctgtctgtcgcgccgagcttcaccgacgcgacgccggttccgccggccatccaaggcgtcctgttttgaccacgccagaattaccggaataccgaaaaaccggaataccgaaaaaccggaataccgatacgaatccaacaccgaaataccgataggagaaacaaccatgatcgtgaccatcgcaaacgccaagggaggcgtcgccaagaccacaagcgccatctatctcgccgccgcatacgcgcggcgcttcgaggagggggccacggtgctcgatgcggatccgcagtccagcgcgagcctgtggagggacatggccgaggaaaacggcgggtggcccgcaggcaccgatgtgatgccggcgaacctgagcacgctccagcggctggcccgtgccgggcatggcggcttcgctgtggtggacgcgccgccgcagggccggctgttcgaggaaagcgtcaaggccgccgacttcgtggtcgtgcccacctccgattcgcccattgatctgcagcaggcgtgggcgacgatgaacgcgattcccgatggcaagcccggtgcggtgctcatcgtgcgcgccgaaccccgcacccgagccttccaggcgaccgtcgccgctcttgacgaggccggcacgccccgtttcgacgccgttgtgtgcaagcggcaggacatcaaggccggcatggggcactcccccgacaagctccacgagtacccccaggtgctcggcgagatcgtcgaagcgatgggggcgcgcgcatgaggaacctcgacatggctttcaggcccgcagcccgcacccgcagcgtctccggcatggccgacgtcttccgctccgatcagacgggggaatggtccaagaccagcgtgagcatgaggcccgaaacgcggcggcggctcaagacctacgccgccgcgcacgacatacgcatccaggaggtcatcgacctcgcgctcgaagcctatctcgcatgacgcgagacgccgtgcgaaacaagcaggtgcccgaaccggaacggtgcagagcgccaccggcggcggcatgaacgcgcggaaaccggcaaccccggctccgacagagaatgaccgaaataccgaaaccggtaaaatcggtgcataccgaaacgaacgatgaaaggacacgaatgaaaacggaacaggaaacggaaaccaacaccccgccgcccacgaacggagaaaccgccgccgtcgaggagtcgaggcgtgttcggccgaagtggctggtgccgctggtcgcgggcctgtgcgcgctggcgcttgtggtggccggcggcatcggatggaaaatatggtcggaccgccgactggccgaggcgaaggccgcgtgcgccacggcctccgacgcggcgcgcggcgcgatgaacgactggaacacgctcgtcaacggcgacgcggccgacttgctggaggtcaaggccgatcaggtgaaggacgcgaagaccatcgacgcgctgaaaaccgcgctggacgtggaagcgccggaatacgagggctgcgtggccgacggcaaggacgggcttgaaacggcgatcgacgaactggacgatgcggccgcatggtacgagaagcacgccgggagcctgaagaaggcggtggacgcggtgaacgactcgaagctggcgaagaccatcgacacggcgaaaaccctgttggagtccagcaacggcaacgtgcaggatgacaagacgcgcgaggaactgtccaaggccatcgaagccaaggacgaggccgcgatagccaaggcatccaaggcggtgaacgattccatcgcggcgaagcagaaggccgacgaggaggcgaaagccaaggcccaggccgaggccgatgcgaaagccgccgccgctgcgaacgcccagacgcaacaacagcagtacaactatcagcagtctcagccccagcaatcctggacaccctcatacccctacggcggaggctccactggtggcggaagcggcaccacgggaggttccacaggcggctccgccggttcctcctacggcgggagcttcggctacagcagcggcgataaatttggaagcggttctggccgggcggaatttgcccggagagcgtgtgcggcgtctgacttgctgacatgcaggcatgaaactcgtccgattcgttcgggcgagtttttttatcattcgcttcggtatgcaccgagtttaccggtttcggtatttcggtagataccccgaatcatgcgttttaggcgtttcccctcctcgtggtcaatatctcgcgtaactgatcgggaaaaatgtccaaactggaccggccgaaatggggttctaatggtttgtggccgaagttttccggactccggctaccggcttttaggccggtcggaaacaagaatctaacaggaggaaaccctatggttttcaacgagaggaaacgggctgatgcccgcaacgggaaggggctgcgcgtggcagtggccgctttgactgcggtggcgacgctggcaggcggcggcatggtcgcggccaccgcgatggccgacggcggcggcggctgggctcccggctcggctggcagtgtcggcggctcggtgatcggctgggcctatgaggacaacaacaacggcggtttcggcggcgctacccttgacgcgttcaagaaggccgtggcgaagatgggcgcgacctataacaactacaacggcggggccgatgagaaggcgaacaccgcgatcacgatggccaacaatgaatgcgtggcccgtttcaacgacaagcatccgggcgagaccgcgaactgccgcatggtcgccgtcggcgtggtcgccacgcccaccacgcactcctattccggcgaaggcttcgccgacgccccctattggagcgacgcatggaacaaaaacatcgcaccgtttgcataccgcaataatggtgcgtcttataaaactagcgacggtttctctgatgctcctgagcgttcggtggactcgatcgcggcctcccagtggaataacagcccggttgcgatcgtcatcatgttgaaccaatacgagccggtgcagccgaactatcacttgagcgtgagcacgcaggctgcggagatgtcgggccagtcgggcgacaccaaggacgcttcggacacgatcaccctgtccagcgacgggtcgaagaccgagaacgtgaacggcaccgcgaccctgcactggcgtggcatcgacggcaccgagaagacggtggcgaagcagttcaccgcatccaacaagggcagcgccaccgtgagcgcgtccttcaaggacatggacgcctcgtgggagtcgtggcctgcgggcaagcgctggtgggacgttgacgtggcgaagcagggcaacatggccgaggcggtctcccacaagggagagaacgacggcaaggagtccggcgagaagaccaccaccccgcccgagaaatggctgaccaacgaggccggcgacacggtgcaggacggcaacgactccatcgcctccggttcgctgtacacggcgcacatcaaggcgcattccaacgcctccggcaagttctggatctacgacacgatcgacaccagggacgtggtgatcggcggcaccgacaaggacgacgtgagcaaggtgaccgtgaccgacgcgaacggcaacatcgtgccggcggacatttccatcgacgattccatcgatggcaagcgcgtggtcaaggcgcacgccaccgccccgcattccggcctctacacactgaacgtgccacagtcggccaagcccaccggcggcgactacgagatcaacgacggttccgtggcgtgctggaacggagacaacggcaccggcagcctggccgactgccagaccggcaacaacgacagcgtgggcaaggtcacgccgaccccggacaaggtgtgggtgctggacgagtccggcgctctcgtggccgaggacaagcaatggaccaaccagcagggcgtcgatcagaagacgttcctcgtgggcgaccaggtgggcgtggtcgtcaacggcagcatccccgcgcacctgctcaacccgctggcatcctattccatcaccgatgatctgaccggttcgaaccagtggatcgactggaagtccggcaaggtgttcgtcgacggcaaggacgagaccgcgaacttcaccatcgcgatcgaccggaaggccgggaccgcgaccgccaccgcgaaggcttcgtacatcgccaagacgatgttcaagaacagcgcgagcaaggtcaagttctacctgacgggcaccatcaaaaagggtgccaccgagggcaagaagatccagctgaccaacaaggcgtacgagaagtggaacaacgagacccgaccgaccaacgagccgccggtgttcgtgtggacacccaaccccaacaaggcgtgggccatgaaggtcggcggcaagtggcagctgaccgtcgatccgaccaaaagcgacaaggtgggcggcgacgacaagtactaccgtctcggcgacgaggtggcggcggtcatctccggcaccctgcccacaggattgggccgcgtgcccgagatcgcgtggaccgacgacttcgccaacgtcgatagcatcctcgacctgaaggacacctccaacatcaaggtctacgagcaggacaccaccgacgaggccaacgccagcgtcaacgacctgaacaagaccggcaaggacgtgaccgaccagttcgacatcaccgccgagggcaccaaggtcacggtcagcgcgaaggactcctacgaggccgcgcagaaggacctgaagaccgcgaagcagatcagcgtcgtgatccccttcgacgtgaacttcgacaccgtgaagctgctcgaatcctacggcaaggcggagggcgacgagctcaacacgtgcgcggacccgaagggcgacgacctcgacaacaagggcggccagacggtcggcggcagcacggtggacaccaacacgccgaagatctgcgtgaccgtgcccccgatccacaagcaggtcatcgccgaatcctcccagggcggcgaccagtccagcatcgacaccaagaccgtgttccccggccagaccgtggaatacaccgtgcgcgtggacccgcagatccctgcggaccaggcatattcggtgaccgccatcaagctgagcgacacctattccgagtacaccaccgcgaacaagcaaaccctggagatcaccgacctgggaaccggcggcatcatcccgaagagcgcctacaaggtgcagtgggacgaagccaaccactcgttcgaggccacgttcaccaaggactgggttgccgccaactggaaggccggctccaacccgcgcgtgctgctgcgcttcgaggccaaggtgaacgaggacgcgcccaccgacaagaccgtcgacaacaaggccgcgctgaccgtcaacaacggcgtcaccccgtccaacaaggtcgagaacgagccgccgacgatcaagccgaagaaggaggacacccagaaggacccgaccatcaacatcgacggcaagaccgcgctgctgggcgacaaggtgtactaccgcgtcaacatcgacgcctccaggctcaccgacaccgcctacaaggtatggcgactgggcatgacggacgactacgaccaggagtacctgaccctcgacgcgaagcacgtggagatccttgacgagaccggcagggaccgcaccggcgagttcaacatccaggacaaggacggcgtgctctacgccttcgccaaaaccgtggacacccagatccccgcgaccggcgagaccgttcccggcgacccgcaacccgacgacctgaaggcgtacagcgagaaaaccgacaaggattacgacccgctgaaggacccgagcatcgaccagtcgctgctgggccacacctaccaggtggtcatgccgatgaccgtcaccaaggtcaaggacggccacacggtaaagaacaccgccacgcaggtcacgaacgacaagcgcgacaagaccaacaccgtcaccaacccgctgaaggagatcaacccgaccaaggacgtgaccgtgcaggtcggcggcgacagcatcgacggcaagagcgtgtatctgaaccacacgttcctctaccgcctggattccagcatcctgcccccggaccgcgcctaccagaccgtcacggactggggcggcacggaccagctgaacaccgagtacgaccagtacctgggcaactgggccgtctacgccagccgcgacctgtacagggacggccagatgctcgcggccaagggcgagaagatcgcgggcagcggcttcgactcctcgaagttcggcggcaacctgttcaccgtggacgccgacgagaacggcaaggtcacggccgacgcgacccaggcctacctcgacctggtgagcgccgacaacgagcacgaggccggctgggtgctctacctccagtgcaagcgcatcgccgtggccgacgaggtgcccaacacgtggaccgagaccatcaacggccagccgcgcgaatccaacaaggtcgtcaccaagaccccggacatgaccccgagcatccacctcgaaaaggtcgataccccgaccctcaagcaggacggccaggagcaggcggaccgcgacgacccgaagcaggcgctgaagatggacgccgacagcatcggcatcacgttcatcatcaccaacacctccaagaccgacccggccaccggcgacggcgcatggttcaaggcaagcgacctgaacctcgacgactccaccatcgtcggcgacgcgcacgtggacatggattcgctcgcctatcccgccgactgggacaccctggtgctcaagccgggcgaatcggtcagcgtgaccggcacgctcaagggcgtcaaggaaggcgagacccacacggaccgcgccatcgtcaccggaaccccgctcgtggaatgcgcgccgtccaacggcgacccgttcaacgacaagaccgacggcggcgaagacaccgatccggaatactccaccggcgacgtgaccgagatcgacggcaagcagctgtgcgccgacacccagaccaccagcaacaccgacgactggaacggctaccgtgccaagccgttggcctccaccggcacggccgtgctcggccttgccggcggcgctctggcggtgctgctcgcgggcggctccctgctcgtgttccgcaagcgccactacgcacagggttccggccgccacacggccgtgaacgcgggcaagtgaccccgtggcgttccggcctcgtcgtccgatgacggccggaacgccctccattgacttcacatgccggaaaggggcataaagctttccgaatcccgtgccccggacggcgtgtgaacccccaggcccttcgccagcctctcccccggcgaagggccttttccatgcccggaacccgtgaacccgtggaaccgtggaaccgtggaaccgtggagccgtgctcccgatggggcctgtagacggtgcgccccgcagcggcccgcgacccggcgcatcatcgactctgacattgttcgcaccatcatcattcctctggaggttgcacatggctgacaggcaaaccccgttgaccgaatgtccggtcgacacgtcggccccattcggcgacggcacctcggacgacgagtccggctccaagcccgagagcaagtccgatgacgtcgtgaccatcgacggcaaggactactgcgcggacaccaaggtggagtccgccaccgacgactggaacggataccgtgccaagtcgttggcctccaccggcacggccgtgctcggccttgccggcggcgccctggcggtgctgctcgccggcggctccctgctcgtgttccgcaagcgccactgcgcacagggttccggccgccacacggccgtgaacgcgggcaagtgaccccgtggcgttccggcctcgtcgtccgatgacggccggaacgccctccattgacttcacataaaaccggggacgggtcccgggaactctcctgcaaaccgtacttgggacccatcccccacacactattggaacagccgtattcattcacggcacattcccgaaaggaaccgaaagacgatgaaacccggtctgagaaaggtcgccgcgctcatactcgcgtccgcgacgctgttcggctcaggcgcgtcggccgtgtccgccgcgtatgcggacgatacgaccatggccacgtccacacgaatccaagccgaacccgacgtgaagacgaccacgggcggcgacgaggccgcgacgaaacccgacaccggttccggcgacgaggccggaaccggggcggacgaacaatccggcaccggtgcgcccgcgcaatccgctccgcaggcggacgcgggtcaggccgcgccggacgtgaccgtccacgacatgctcgacacggacagcgccgccgtgagcaggctcaggctcatcgaccgcatcaccggcaccgcgccgttcgacgcggataacgaacgcggcgacgacaaggacgaaaccaacgacatcgtccgctcatacgatacggtgacctacgactacgagtacacgctcacccccgactcgaccatggactactatcggcgcacgcgcgtcggcttccggttcgaactgccctacccgaaggacagggtcacgttcgacgcggagaagatgggctgggtggaccacacgcccggctacgagccgaaactcaccacggaaaccatcgacgggaccgtcacgcaggtgtacacctgctaccgcctgttggagccgaccagccagtcgccgaccgtgaacccgggcaccggttccatcggcctgtcggtcgccgtcaagggcgcgccccacggctaccggttccatccgaccgtcaaggcgtggaccgcatgggacgcctcgaacccgacgaacacgggcacgcacaaacgggccgaggacacgccgaaggatgtgaccgtcagcgcgaaactcaacctgaacgtgcgcatggtcaactacggcaacgtggacaggggcgtgttcgacttctcctcgggtgcggcgaacgcgcccaacaggacggagggcaaggtgaccggcttgggtttgggcatcgcattggtcacggagatgcgttggcccgaccggacgaaggggttgaaggggttggaggctccgtccggcaggatcacctataagattcacctgtccaaccagtattcggatgatacgaagaccgggacgaagcatccgatggaacgccgttggcagccgttgctctacgattacgggcatatcgacaacgaagattcgaagtatgggcggacgttcgcatggatgggcgatctacattatagggctccgggcgtcgccgaccatgccgacgggaacgaccgtgtggcgcgtggcaacacgacggtcacgaccacgaccggcgggcagggcacggacgtgaccgtctcgttcgacgggtacgacacgtccgtcctccccatccacaataaactgaacggcacacacaataaatgcagcacggattacatgacgtcggactgctccaccatgcaggtcggagccatccacacggacgtgttgcagttcatcacacccaccagccgtgacggccggaccgtggcgcaatattacgggaacgtggaccagacggccaacatcaccatggacgacatgggattgacggccaccggcgtcagcggagaccgtctcgccacggcggaagacaattcgaatcaggcctccaccggtgacgaccatgcgggttcggccatgaccgtccgcatgccgggcacgtacagtacgcgcatccgatacacgtgctggaacaacgaaggctcatggaacgatgcgggcacgagctgcgactggacgcaacccgactacggcaacgggtcagacagtctcatacaggggtcgaaactacgcctccaaataggccacaacatcatcatccagtccgaaggcgacgccgaagtgatgggcatgggtttggtcaaactcgacccgaacagcatcgaaccggtggacgaccatcccgacacgcagccgaccatccccatgaacgtcttcacgtggggcatgagggcagccaaacggaggaacgcaatcccctactggtacgccgtcaaaaaggacggcaccaactggaaggactacagggagcagcgcgacacgaaaatcagcggcctcgactactatccgaccctcaacgaggcgaaacggcatggcaagatagtcggcatgctgttcgaagaccacaacacggtggacccgaccggcacgagcttcaaccgaacattcacgcccatcgtctccctgcccgcccgcatcctcgacaccgcgagaatcggcacggtcacgcccatcgtcgcagaaaccgcctactggacgcgcaacagcctcgcccggaccgcgaacctggacgcggacgcgccggacacgcaatggcagcaatggtccgacagtctcgccacccgactgcccgaatacgcgaacagcgtgaaacccgacctgacctacagcggcgacacgtaccgtcccgccacgttcgacgaaaacggcgtctatcagggcggcgacaccgccgacttcctgaaaggcgacagcctgtacgtggccggcgaaacaccgcacatcgccaaacaggtcgagcagaccaacgaggccggcaacgctaaaaccgtctacgatttggacaaggagcagcgtgcggtggactggaagctcaccgccaccgccgacacgtccacgaccacggacggcggacaatacacgaccgactacatcatcaccgacacgctgcccaaaggcctgacctacgtggacggttccatgacggtcggcggccaatactcgcagcatacgcccgacaaaggcacggtcaccggcggcacgcccgtcacgccgacgatcgttgtgaacaaggacggcgccaccaccatgaccatcagggtgaacggggcgcgcgccgactccggcacgcagaccgtcatccactattccaccaccatcggggacgcgtccgaccccgaccatgacgtgaggaacaacgattcgttcacgaaccatgcgaccatccagtcgaaacgcaacatggctcccccattggctccaaaggcgcagatagccgacgcgacgatacgcgtcagccgcacgcgcgcgtccgcgttggcgacccgcgccgacccgctgctgaacgacatcaaccgcccattgggatacaggaacatgctgggtaacttctccaaggacgagaaaaccgacccgtacgcggtggacgtcatgccttacaggggcttgaaccagtccaactatcacggcgactacgctctgaccggactcaccgtcaaggcgggtgcgggtgcgagcatgaacggcgtcaaagtctacttcaccaccgaccagaagtggcgcaacgtggacgcgacgaagataacccgcgaacaggtccaacaatggaccgaagccacggtgaatgcgaccacaggcaaggtgaccatccccgacggctacagcaagccggtggcgtgggcgttcacctcgccaagcctgcctgccaacgcccgctacgatttcagcctgagcatcaagcctacaggcaacagcgcgtctgacatgtacgtgaaccgttgggcggacggcgacaacaaggtggacgcggtcacgcaggtcgtggaacgcaaggtcaacggcgtcgcatggttcgacctcgaccatgacggcatccgacaggattctgaccgtctcctccccgacgtgaacgtcacgctggtggacgcgaacggcaggacagtcaccagtgtggacggcaaaccctgcaccgccacaaccgacaggaacggccactacgaaatcggttccattccggcaggctccgggttcaagctcaggttcacgccgaaaaccggcaccgcctggcacgggcagaacgtcaccgtcaaaaacgcgaaggaagcgtccgaggcgaccgactccgacagcgaccgggagaacgattcgcacggcgacatggtcgccggcgtcatcacgctgaaaccgttccccgcgttggacgagatgacgtccgccgtgtacgaggacccgaacgaggaccacggcatgagcggcacgctcatgctcgccacgcccgccacgttcaaagcggtcaaagtattggacgggcgtccgaacggcgcttggaccgacagggacaggtacgtcgcggacatcaccgcgttggacggcgcgcccgccagcgcggtgccctccaccatcacgttcgccgacaacaggacgcagacgctccagatcaactccaacgcgttccccacggacggcgtctaccggtatcaggtcaaggaacgcaagggagacaatgcgggagtcacctacgacagccgcacttggattctgaccgtcaccgtccaggacgatttgaccacgttcacccgtcgcatcaccgccaacacgacgtgcgacggcgtccaatccgacgccatccagttcacgaacacgtacgcgccgaaggacacgcaggcgcgcatcacggcgagcaaactgttcacggacgcggacaggtcggccacgaagattaccgacttccagttcgatctgtacgcgaacgacaaggcgaccggcacgcccatccaaaccgtgaacgccacggcggacggcagggtcgagttcgccccgctcctgttcaccaaggcgagactgaacggcagggacagggccgtgttccgctattccgtgcgtgaacgcaatacgggcgctgcgggagtccaatacgacggacatcatgcggcgtggacggtgacggtcacggacgacaacagtggccagttgaaggcgaccgtcaccaacccgtccgaaaccgaaggacggttcgtcaactcgtattccagccagcccgtcacggtcacgccgaaagcccgcaagacgctcgccaatccgtccggaaccctccgcctgttgaacgccgacgagttcacgttcgagttgcaggatgcgaacgggaagaccctccaatccaaggcgaacaaggccaacggcacggtaacgttcgacaaaatcacctacgacaccgtaggcgaacacgattatcgaatcatcgaacagtcaggcaaactggcgggcatcacctacgaccagaccgtgcatatgatgcacgtgacggtcaccgatgacgggtacggacggttgaacgccgccgtcacctacgacaacacgccggacgcgccggtgttccgcaacacgtaccagccgaaggacgtgaccgtggacctgaccgcccgcaagacgttcgacaacgcggacgccagccacgcgaagctcaccgacttccaattccaactgttcgacaacgagcgggcggtaggcgtgcccgtgcagaccgtcaacgccgccgaggatggtaccatccgcttccagccgttgacgttcaccgccagccagctgaaaggcaacaagtccaagacgttcacctatacggtgcgtgaaatccgccagtcggcgggcggcgtcaactacgattcccacatgggattgtggcagatcaccgtcaccgacgatttgaccggacggttgaaggcccaaaccagaacgaacgcggcctatccgaccacgttcacgaacacgtatcaggcgaagccggtcagcgtgcaattccgttcgcacaagaccctcaacgaccccgaccatacaggcatccaactgcaagccggacaatacgagttcacatgcgtcgaggacaagacaggcggtcaggccggaacggtgaaaaccaacgaccagcggggcgacgtcctgttcgacgccatctcctacaagaagacgggagtgtacgactacacgctcagcgaagtccacggcgacaagggcggcgtcacctatgatgctacgaaacatcatgtgaaagtcaccgtcaccgacaatggcgaaggacaattgctagccgacgtgaagtatgataacggaaccaacattccggaattcaccaacacgtaccatgcccaacccgccacggacaatccgaccgcagtgaagaagatgaccgcgtccaagggcaacaagtacacgctcaagggcgaagacttcgccttcacactccaccaacagtccgcgcccgccaacgtgtcgaacgccgaccagacgaaacggaacgaccagcagggcaacatccgattcgaccaactgtcgttcccgctcgtcggcacctacgtgttcaccatgtcggagcaggatacgaccgttccgggcgtcacgaaggatgggacggttgcgaccatctcctacgtggtcaaggatgttgaccatacgggcaagctgaccgtcgtatccaagaccgtcaccccgaccaccggctctaacggcaagaacatcacgttcaccaaccattacagtccgaagaacgtcggatactctatcagcggcgtgaaaaacatcgtcaacacggatacggcaaccagccgcgttccgcaggacggtgaattcaagttccagttgaacgcggtatccgcacatgattcggacggcaacgccatcagcgtgaacgacatgccaatgccagccggaagccaaggcggaacgcaaaccgtgtccaacaagggaagcggattcgcattcggacaaatggtctacaccatgcccggcgcatacacgtaccacgtgaaggaactcgccggaacggacaagaccatcggctactccactcaggaatacgatgtgaccgtcacagtcaccgaccaagacggcatgctcgcggcaaccgccgaccttcagaccaatgacatccgattcgacaacacgtacacgccgacacccgttgacgtgaccgtgaaggcgggcaagcgtctgaccggacgtgatttgaacgatggcgagttcgccgccgaattgaaggattccgacggcaacctcctccagaccaaacggttcgcccgcgttccacgcgacgcgcaatccgacaaggcgaacgtccgcgaaggggaaggaaccctcgaattcgacaagctcacgttcgaccgggccggcgtgtacacgtacaccgtgaccgaacaggacggcaatctgggcggcgtcacctacgacaggaccgtccacaccgtcaccgtcaccgtcaccgaggacgcgaagacccatcggctcgtcgccgccgtctcctactccgacggcgagggcggcgaggaaggcatcctcttccgcaacacgtaccgtccgggggacgtcgtggtcgaactcgcggccaggaagagcttgaccggacgcgggctgaaggccgacgaattcgagttcgaactcgtggacaaggacggcaaggtcatcgacagcgcgaggaacgacaaggacggcgacatccggttcaagccgctcacctacggtcgtgacaacaacggcatcgacgattgcggcgaacaccggtacgtgattcgggaaaggaacaccggcgagaagaacgtcacctacgacaggacggaacaccacgtgaccgtcaccgtgggcgacgacctgcagggcaatctgaccgccaaagtcgaatacgatccgacggacggtacggcgaaggattccggcgccatgcccgccacaccgaccgacaagaccaagggggatgccgtcggggacggtccgtccacgacccccggcatggtcacaaccaccggaacccgacccgagttcaccaactcgtacatcccaccggcgaccccggccatcgtgaagacgattcgccaactcgccaagaccggcgtatccgcgcccatcgtggcgttggccgcgttcgcgctcttgggagtgggattgatgctgttccgccgtcgcggaaaccaaaccgagaccgcgcggcacaggaagtaaggccacggtaggacagtagaaaggccgggcgggagagcggattccccgcccggccttttctttggctctgttagaccaaggttgacctaagaggatatatgacagaaacccgcttgtttaactgtgctgaaaagtcaaacaagcgggtaaatgtcagtctacttcagggacagatcgacgatggcgctcaaatgtgcgagtagctgctcttccagcatggacgccttgtggtcgggccggccagcctgacgcaccttgcgagcgatgttgctcaattccgcttcgatttcctcttttggcctgccttctgagaatagcttgaagaacgacacccagtacttcgcttcgatacccgccatgagcgtgtccatggattcgttcacccaatccgccatgagaccatccactctggcgatacgcccaaagttgcctcctccgtcttgattgggaacatcaacatattgcgttcccggtttgggatacggggtggtttccggatgatggatgccacagtctcgtttggagttgtctcctctgcgatgattccagtagtaagtgcgcatgtcggaggcgaatttcgcctgttcgacgtagggctcgtagaccacgggcttgccgctgagaacgttggacaatccccaaggaacacagcagatcaagtcccattcagtcactgcgtcggctgatgccttgtatcgtagagatggctcggattccttggaaagcagataccaccctttcagttcgatgccgatgagcggcgaatcgtccttgttggagcctacaagccttacgtccgggaaggattcgggatagcgtcggaattctttgtccgcccatttgccttgcgggtcccatatgctgcgcagggagttcaacagcatgacggtctgggcctcgatggtgccgccgagcagtgtattgattgagaataggtcattgacctcgatgccttcgacgttgatgggcgatgtgaagtgcatcggaagggcatacaatgctcggactatgccgttgcggagttcggtccgttcgtccccgtcgggaagctcgtagtgttcaggtcggtccttgccgtcgtaatcggtcatgcctgccttctttcgagggtcatcgtgtcatttgcgtttttcgtgtcatactcctcttcggcctccgccaatcgtccaagggccaggttctggaattcctcgtcgatttccgccgtataggcgatgcgaccggtgagcacggcagcgacggatgcggacgccagcccgccgaatggctcccagaccacatccccctcattggatgcggcgtgaatctgacggtccatgaaatccagaggcttctggttgagatgcgccgctgattgtttggagggtttgtagactcgtggcgcgctgcgttgcagggtccccttgaggcgttctccgtcgtgaagcggtgggcgtgaccacacattagtgagtccgttgacatggttccatacggcacggagggagtcccattgttcggccgtgatttcggtatgcccgtcgatggagaagtaaggacggctggtgggcttgccgttgttcttcgtgtattcggccatgcgttcgaccatttccccgggcggccaataccatagccagtcggcggtgaggtacttgcgagtggccgcgtttttcacaccgcatgcctcgttcgcacggcagagcggcaggccggaacgccgccattcggcacgtagccattgctgcactccgagaactccgccatcctctgtgggaagcgtcagcctgcgacggtacagggcggagacctcggtgaccacggggaattgtcgaatggtgttgccgttcacgttgcctgcgatatgcgacagccccttgtcccaagtgaccagttgcacgtattcccaaccgttcgcctccaacagcggatgcaccgtggcccagccgacctcggtgttccagaaccacagcgaggtcgaaggtttcgcccgtttcgaccattgggccacatggggcgcataccagtccacgagtccatctgcactcacggtatcacctcggaatcctcgcacgccataggctccatcgctgacgatcagatcaggggcttcccaatccgagtacacgtcaagcacgtttccgcgatgcagcgtgtatcgatggcctttcgcatcctgcggacggtggtccttgatgcggatgaccttatctgccattcgatgtttccttcttgacttcgaacgggagtccctgttccctgacgacggccttgaggaagatcgtgaccgctccggagagggtaagtccgaggtcttccaacacccggctggattcctctttgagctgggggtctatcctcatggtcgtggttggtatgctcgccatacgcgcctcctatttgtctggttgtttcgactgtacatcgtatgcacgatgtcatgcggatttttgccagtagtccatgtacggtggtgccatacgctggtagtcgcgacggcggattcggtacaggccgttgccgagctggcgggcaagcagccggtcgtcgtcggtctcgccgaatccgccggtgaacgcgccgagccattggaaccagtccaagtaggcttgcaggtacttcgtggacacgccgtggaagccgaacatgaaatcctccaaacgggcatgcagcgtgttcaccctgttgatcgcgtgaccgtcggcggaggcttgcgtgaggttcgcgcccagttcggccagcggtttcacgtaggcgggcgcaccgtcggtcagcacgtcggtgccgcgtccgatatggggtttcaacgcgctcatggcgcgatccttggagatgacgccgcgcccgcacacggtcaggaacgaccggcctgcgtcatccactccggtcgccacgcatatctgctccttcgacagaccgcgcttccttaatgccttggtgcgcttgtgtgccttgcggggcatgacgaacacggtcgatttcgtgtggttgcctttgaagctctcacggaagtacgtctcgtccaactgcacgcacaacccggcctcggaatgcaggacgggcgtgtatcggcggatgcactcgatgacccgctggcgcatgaggaacgcggtcttcaggcatactccgcaacgttgggcgcacttgcgcaagctcaggcaatccacgaagcattcgaggaaccgcatccatacgcccgctttgagcttgctcatgcccatcacccggttcgtgcgaacgccgaacgtcctgttgcagttcatgcacttccaacgctgggagccgtcacgtccacgccctttgcggatgatgcggatgctgccgcagcgcacgcacgcctccatctgtttcgggtcgctcgtcgccgcgtccaacgcgaacccctcgtacagggcggcgcgtaacgccttgacagcaaggtcgcgctcctgcggcgtcagttcgcccagttccttcctgaccctatcggctatacgcgccaccttgcccgttctcataccactattgtagctactcagcaactacaatacaagtcaaaaagtcaaccttggtctaacagagccttttcttttgcaccggctgcaaggtgacgtcctccctctcggccgaagctgaaccgcaccccgattgttggactgaagaaattcagattcgatgatcggaggtgcggttctttcgtatacgtgaggatcgaaggagacgttacgacgacgggttccgggcatgggaaaggcccttcgccagcctctcccggcggagggcctttcccatgcccggcccgtgaacccgtggaaccgtggacccgtggagccgtgctcccgatggggcctgtagacggtgcgccccgcagcggcccgcgacccgacgcatcatcgactctgacattgttcgcaccatcatcattcctctggaggttgcacatggctgacaggcaaaccgcattggcagtattcgattttctcgactcgctgcgcgccggacaataccgcatcggcgcggacgcggaaaaagaccatgccacggcgggactgctggcatcgctgtccggcgacacggggctgcgcgacgccgtgtgcgccaagctgatatcgccgggcctggaacgcgcccgtttcctcatggtcgccgagcatgatccgcgcgccttgcccctgttcgcctcgggccaggtcaaaccgtggtaccaggccgactacaacgtgcgcgagatcgccaacagcgagttccaccaggacatacccgcactgctgtggcggctgtccaacaccatcccggattccgcgcgaagggagggcgcgcttgaggccgccgcgtacatgagcttcatgcagggcgatcccgaggccgcgttcaccggccatctgggccggctcgcggcggtttcacccgagggcgaggtcacgcgctgcctcatggacgcgcacgaacacggccagcatcccgcatgggtcatggaacagcggcagctgcgcgaacggcaggccgacgccgccgacggcatgaccgccaccgcaccggaccgcccgagccttcgccagcgcctcttcccgaaccgatgaacacctccggcacggacccatgggagatcggccccataatcgccgccggcaccgccgtcgccatcgaaccggcacaggaaccggaaccggaacgccggccaccggccgaacccgaacccgagcccgggcccgggctggagccggatgcgcgatgcgtggacgacgccggaagcgaagaccgggcgaacccggccgtcgatccgtgggagatcggcccgctgccatcggcctcgaatccggtggggaatgatatcccggccgatgccccggcatcggaaccgcagcacgttggcggtgccgtggagccggccgatctcgccgacacgatcgacctcacgccggtcggcgaccgggatgccgccatgcccgtgcgcgaatggaggcgcatggccacgaccgcgggcggcatcctgctcgcggcctgcgtcacggtcgccggcatgtccgcgtggagatcgcatgaatccgccacggccgcacgcgagctggaacaggcgacggcggactgcgccaccgcccacgctgcggcgaagaaagccgaacagaagctggctgaatatctcgacggcgaccggctcgcacaggcgaaagcggtcacggccgacaagctcgccgacccggaaaccctggaaaccctcgacaagctggccgaacaatattccgagggcgagcgaatccccgcatgtgccgccacggacacggaaacggccaacgccaccacatccaagctgcaagccatcgaaaagaagcacacgggaaatctctcgcggctgaagaaggcggcgggcgcggtgttctcctcacggctggcccatacggtcgaacagggcgaacgattgtattcctcctccgaaggcaaggtgcaggacgaatattctcgcgccctgctgcgcgcctccatcgacaagcgcgacgagaaggccatcaccgacgccatggacaaggtgaacgcctccatcgacgcgaagaccaaggccgacgaggaaaggaaagcgcaggaggaggccgcagcggctgcggcggcgcaggcgcagagcacgccggcaccgcaacagtactcgtacacgccctccggctccgcttcgggcccgggttccggcccgtccggcggcggataccattcctccggcggttccgccggctcgaccggtggttccgcgtctccgggctggtcggtgcccgcgaacccggacccctcgcaactgcccggcaccgacccgagcctatgaaaggaccaacaccatgccacaactgaccacgttgatcccgtcgttcgcggcacccgtcaccgaccgcgtgtggctggtgggcgcgcacggcggtgccggatgcaccacgatccgccattcggatccggaacgtttcgccgacgccggccgcgcgctgccggtgagccaggatccctccatgccctcgcgcatcatcctgtgcgccatgggcacggggcgcggcctcgaatcgttgcgcgcgctgctcgccgaccagtcggccggactgttcggcgcatcgatcctgttgggcgcggccatcaccgatcccgcgccccgtatgccccggcctttggtggcggcgcgcatccaactgtcatccgccgtccgcgtgtggcggctgccccatatcaaagggcttgaactcgacgggtttccccggcgttatccggccgcgtactcacggctcgtgaaggacgtagacgccatgccccgcgccacggcccatgtcggctgacgatggtgcatgaacctaacacgaaaggaacaacccaatgctgcatgaaacatgcgtgatcctcgccgagaccctttccgacccgaccccgtgcctgcctccgggattctcgggcccggtatccaccgccctgggctgggtgaaggcgctgagcctggtgatcggcgtggtcgcgctggtgcgcatcggcgtgcacatcctgcgccagcagggcgacggcgtgccagaccgcgacgacaccttcgacaagctcgtcaactgggtgatcggcatcttcctcggtgcgggcgctgtcgccatcctcgccgcactcggcctgtccgtcaccgcaagctgctgagaaaaagccatgaaagggattcgacgcatacggcagcgcctgtgcgcgctgctgctcgccctcgcctgccttgccggcctcgccgcctgcggcggacccgacttcggatcgttcagcaaggagctcacgttcggcgacaagcagatcagcgacacccagaccacctacgtgatgaagatacccgaaggcaagctcggcgacctgatcggccccagccagatccaatgggtcatcgacaagtaccgggccggctgggtgcgtgccggaatggtgtccgcgaatccgaccggcaaggagctcaagaagtatgcgcgcgcccagttcaaggccgcaccgaacctgcaatgcgatgcgttggagaacacgtatcaggaggagtcgtccgacgagggcaaatgggagtacaaggactcctcgtgccggaagcagcgcaagctctcctggctggagaagaccctgtggaacatgtaccaggtccaatcggattccacgatcgaatggctgtccaccagccgcaacacgctggtcgccgcgaacgacacggtatcaacgttgcaggcgaacgccacgccggactacgattcatggttcgcaccggtgaaccggtacctgcgcatcgcgcagggcgtgctcattgctgccgccgcgatcagcctgatcgtgctgagcgcgcgcatcgtgtggaacatcggccagggcggcgaggggcggctgctcgaccgcatcggctggatactgctcggcgtgctgctcggctcctcgtgcgcgagcatcgcgctcacgttcttctcccgctcgtccggcggcaatccgggcctgccgtcatggacgccgggcggcggcaccacgttcttcctgtcggactacatccgtatgcaggttgacccgttccttatcatcgcggccgtgtgcggcgtgatcgcggccggctggaagctcgtcacccaacaggagggacgtgacctgatcccgttgggcaaggcgttcatgtgggcgatcctgagcgccgtgtgccttgccggactggtcaacacgttccaggccacattcgacacgtggaccgccgacgtgctcaggtccgcaagcggcatgatgaacgacgcctgggaatcgaaaagcctggccgcgagctcgttcttcaatctcggcgcgcccgtcgccatcgtgctcaccatcgtgatgtggatctgcgggctgatcagcaagatattcgcctacttccgcgccgggatgctgccgatcctggtgggcgtggcacccatgtgggccgccatgagctggatggagaccggcaagcaggctttcgccaagaccatcggctggctggccgcgttcctggcctacaagcccgtcgccgcactggtcatggcgaccggctcggcgatcatggccacggccgggcccggcgacgacagccaggccatcacgctgatgctcaccctgagcgtcatcatcctccttcccgccatgatccgcgtgatcgtgcccgcagtgcaatcctcggtcggcggtggcggcggcggaatcctgccctccatactcggcatgggagtcgccttggccggtgccggcgtgcgcaaggccgcaggaggcaagggcggcaggaaaggcggcggcgacggacgcggcgaagcgtcaccggacggtgccagacccggtgccggtcgcggcctggccggactgctttccgggctcggccgaaacggcggaaagccgcagggggcgaacggcggcggcaagcaagccaagccgctggacggcaatcccacgggcgacgaaccgcagaacatcggcgacaagccgcagggagcgaaccgcaagggcagcgacggcaagccgctgggagcgaacggcaatggtgcggggagcccggttccaccggcacccgatggcgcatcacccgacccgtcaggcggcaacaggccgcagggggcgaacggcgacgccggcgggttcgcccgcgagggcgccccggacggcgccgaccgctcgaccactcgcaagggcaagacattctgacgcatacgttttgttaaggagattcggataatcatggcgtcgaacacgacatacggcgattggatgcggccgatgccgggcggcatccgcaatatcggcatcccgctgacgatagcgggcatgggtgtgctgacctgcacgctgctggtcagcatggcgagcgtggtcgcggccatcgcgatcctcgtggtcggcatgggcgtcatcctcgtgttggcgatccgcgaccgcgagcaccgcaacatggtggatcgcaccgtggagaaacgcacgtggatggccgcgcagcgttccggcgctaacctgtatcgttccggcctgctcgcgccgatcgacggcggcaaggccatgcttccgggcatcctctcacgggtgggcctgacctccgccctggacgggctgggcggcgagttctgcctggtgcggcattcgcacaccggcgaatactcgctgctcctgtcatgccagccgcagggcgcgagcctcgccgacgacgacgtggaggattcgtacgtggcctcgtgggccgggctcatggaatcgctcgcctccgaggccggtgtcacccaattggccgtgaccgtggacacggcacccgattccggcgtgaggttccgccgcacgttgagcagacgcatcgtcagggacgctcccgagctggccgcgcgcgccatggcgcagatcatggaccagtacgcggccggcggcgcttccaacgatgtgacgctcaccttgactttccgctacgccgaccgtgacggcaaatacctggaggccggggaggccgcgcgtcgcataagcctgctgctgccctcgatccgcgagcagatagcgcaggcgggaggcggtgccgcgagggccctgggcatggaggagatcacgcgcatggtccgcgtcgcctacgatccggccgctcaggagacgatcgaggaatccgacgagccgccgtacatcgcctgggaggattgcggaccgctcatgcacgaggccggctggagccattacgcgcatgattccggtttgagccgcacatgggagatggtggatccgccgaaaagcaacgtgaccgccgacacgctcacccggctgctttccccgttggcggactgcggccgcaagcgagtgaccgtgctctaccggatgctgccgcccgacaagacgatgttcatggccgagcagaacaggcagaaggccgcgaaccaggtcagccaggagaaacgggccacggtgaggtccatgagccagatcggcaaggccaaccgccaggccgtcgcaacgaaccagggcgcggtcatggtgttcttcgggatgctcgtcaccgtcaccgtgtccaggggcgaacaggaaagccaacggctcgaagccgcgtcacgcgccgtggaacaggccgcaggcggcgcgaagatcgacctgcgcccctgctacggggcacaggacacgggattcgccgcaagcctgccccttggattgaacgtcagatcatacactccagccggccccctcggccggctcctgtcctgaacggaggacacgagatgccgatgccatggaagccgtcgaaacggaagggaaccatgccgagcgccacggccacggaccccgtggctcgcatggaatcaatgctgctcacaccgttgaaggccaaaccggacgagcccgtgcccccggtgccgtggcgtggaagaagatcgcgcggcggcggctacgcggccctgatgcccacgatcgacgagttcttcggcacgtcgaaccaggtgtgcggcggattctggccgttcggcaccgacatggccctgccggccgagggggtgccggtcgggcggagcctgatgacgggtgccggcgtgtgctgcgacccgatcagctggttcaaggccggcatcatcaaacagccgagcatgttccttctcggcctgccggccatcggcaagagcacgttcgtgcgccgcgaggtgctgggactgagcgccctgggcatgaacgcgatcatccccggcgacctgaagcccgactacgcctcgctggtcaacatgctcggcggccaggtcatccggctgggagcgggcatcggcgtggtcaaccccctggaccccggcgacctccattatgcgctgcaacgcttggagggcaaggcgcgcaaggacctgacggactactacaacgacacgagggcggcgctcatggaggtgcttttgacgatcatgcgcaccggccgcgagaacgacaccgatgccggtgccaggggcgtgaccgcacgcgaatccgatatcctttccgtggccgtgcgcgtgctccacgaccggcatggcggcgatccgcagcctcccgtcatcgcggacctgcgagacctgctgagggaagggcccggcgaggtgcgcacggcggcggtctgggacgacccggaaaacgacgagctctacagggcgcaggttcgcggccttctggccgacctgcacgggttctcgaaccgcatgacgaagttcggccgtctgttcggcgaccagaccaccgcgcgcatcgacctgtccaggcccgtggacttcgacatcagcgccctggcccagtcgggcgacgatgtggtcgccgccgtgctggcgaccacgtggacgagcgcgttcgccgcgaagaacgccgccgacgtgctcgccgaggagggattacagccccggcgcaaccacgtgatcatcatggacgagatgcaccgcgctttgcgcgccagccccctcatggtcgaaaagctcgacctgctcacccgtctgaacaggcagtggggcgtaggccagatcatgatcacgcacacgttcaaggacctgatgtgcatggagaccccggcgcagaacaccaaggcgcgcggcttcgtggaacgcagcgagatcaaggtgctgggcgctttgagccgcatcgaggtggaccgctacctgcgcggcgaatgcggactgcccgtatcccggcgcgaggaggacatgctggaggattgggccacgcccgtcaacttcggttccgatgcctcgcacaagggtctgggccgtttcctgatcaaattgggaggactgcccggaatccccatcaacgtggagatgtgcccgctcgaaaaaagcgggttcaacgatacgaacctcaaatggcacgcctagaagggaaccctgcgatgacagaccgcctcgccaccggcatgaaacgcatgatccgcgccgtggcacgctccgcatcactcttcgaccggctcggcgagcgatcccggctgctgcggctgacgggcaaccgcagcactctcgacttccgccccgccgagcacggcgcatcctcatgggacttcgaaatgtcgataacccccgccgagccaaccatacggcaacacggaaacccgtgaacccgtatggcgtgagacggtcgattccgccacctatggcgaatcgagggcgcgggtcgcgcacgccgtcgaaacgttcagaatatacgacaacaccggcttcctgccggaaacggaaatctggcccgaaccggaactcctcggcctcgtggacgacctgaccggccgcacgggacgaaacctataagaaccctgtagacgccgtgccccgcgccgccatggccttggactgatgatcggggtcatggcgggaacgccgggttgccgccgaggattgtcaaggagccgaacatgcctttggagaacaccgatgccgaagagcggatcacacgggagacgatgatcggatggatcgagcattggggcgaatcgtatgacgacgttcgacccgatgacggtgccgtgcggctggcgaaccgcatcatcgaatacaacgagatgacggaaaccgtcgaagacctagggaatcccgatgccgtgtacgacgagctggcatccattctccagccggtgctctcctcgatggacggcacctgtttcgcgggctccgaatggttcgccggcgaagtggaccgcatggaagcggaccgcatcaacggggggcagccggaagaaacggacggcttggtctccgaagggccccgcatcccgttcatcgtggaggccgaggccacggccgccgatacggacgaaccgccgttggacgagctgatcaccgcagccacacgcgaatatttggactcgggcatgacctacgacggattctcggaacatgtgcgcaccacctggcgcaacgcggcagcctacgactggtcgaagctcatggccgaacagcgctccacaggcgaatggtcgtccgacgcgaaccggctcgccgtattgggcgtgacgatgcagttcgcgcccgaatcaacatgcatgatgatcgccagcgacatactggccgagaacgctcccctgtcccttccggcattgcgcgaacgcatcaatacgccggacggcatggtgaacaccgacctgctgttttcccggctgatcgacaacggcaccacgcccgatccggcgcgcatcggcatggcgatggggatcctcggcccgttggaggcgaacgcgccgacggacgcctgctaccggatcatcggcctgaaggccatgctcggcctcgccatgggcgacggcgagcaggcgcgggaactcgccgaacaggccatcggctacgacgcctcggatcggttcgcgtcaagcgtgctcgaccgtctgccggaaaccgatcccgtcatggaggcgacgaacgtgtgggagaacggcgggcatctgggccgctgacgtagacgccgtgccccgcgaggccgccggtccggccggatgatgggagtcgccgccgccatcgaaggcgctggtattccccgaatgaaaggaccatcatcatgccacagtcaatgcaagtggttcgcggtctcctcgccgcgaaccccgattactggccggcgaaaaccgacgcggacggtaccacgagctcggcgtacctgcgcgccaccgtgtatgaggaccgcccgcgagtccgtcagaaggacggcagctatacggacaatccgctcggcccggtgagaaccaccgtgaaattctggggccaggccgccgagctcctgcacggcatggatttccgccagggcgacgccgtggtggcgaccggccgcatgggcgatcccgacgccttcatcagccagaaggacggcaaggcatacgcgcgcccggtcgtgattggcgattccatgcagatcgattccatcgtgtccaggcgcatccagctcgcccgcgaacgcaaacgccaggacaaggaacaggccggtgccgtggccgatgccgggcgaacggatccatggacggaccaggttgacgcctcgcgcggcgaatacgttggcgacggcgttccccgcactttcaacggcgagcccttcgaaccgctgtcgggctatccgacaccgggcgcggcccccactccggcggaccctgcggcaccggatttcctttccaccccatccgatttcacgacgggcaacgcccgctagccatgacgcaagccctggcgcatcgacggcgggaccgcttccatcggttccgccgtcatgcttgaaaggagaaatgaatcttggccgacgtcgatccgaaactgcaatcgaaccgagtgaaggatctgggcggcacggtccgtcccagccgcaagatcgaactggcgatcatcgtcgcggtgtccctgatcctcacggtgttcgccctcgtgtgctcccatgcggggcatcccttccagatcttcgcgctcatgtacctggtctccggccaatggtcgctgaccgcaggccagtgggcgctggccgtggccgtgctcgtcgtactggccgtggtgtgcggcgtgggcgcgtggctgatcgccagcaaggccgtgccgtgggcaaccggcgccaaggcacgcacccgcgtggacgtgtacgcgccggcgatgggccatggcgaggccgtggagaaggtgacgcgccagcgcgccgaggccatggcgtcaaggctcatagaagcggaccactggcgaaagggcatgtcgccgggctatccgctggggctcaacatcgtggacaacacgtcgatgtacaccagctgggaggacatggcgatcgttctggcgggcccgcgttccggcaaatccctgtgctacgcgatcccggccgtgctctcggcaccgggcccgtgcctggcgacctcgaacaagggcgacatcctcgacgtgaccgccccgatccgcaggctcgaccatccgaacggccggatatggacgttcgaccccgaacgcatcgcggacccgaaccggaagagcgcgccgtgggtgtgggacctgatcgcctcggtgcagtccatcgccgacgcgaaacgcatcgccgactgctggcgttacgcctcgggccagccgcagaccggcggcgacgacttcttccccggcaccgccgcccagcagctcgccgactacctgttcgccgcgcatctgggaggccgttccgtgtccgacgtgtttcgatggtgttccaacgagcgcgacacgtcgccggccgacatcctgagcgaatacccgcgctacgcgggcatcgcctcgcgcgtgtccagcgtgatcgcgctgacgccggaaacccgaagcggcgtgttcggcagccttcagaccatggtcgcgttcctcgcggaccccgagatcatcgactggatcgacccgcaccgtgatacgaatgggaacatcgacgagcggcgcggcctgttcgacccctacgagttcgccacgagcgaggacaccctgtacctgctttccgcccagggccggccctcgaccgcgttgaccgcgagcctgacggcggtggtggcgttcaccgcgttccaacgcgcccaatccgagttcaccggcaacaaccgccgtctgccggtcccgttgtgctgcgtgctggacgaggccgcgaacatctgccgctggcccgaactggccgacgtgtactcgtatttcggttcggcgggcatcccgatcatgacgatctggcagaaccccgaccagggcagggccgcgttcggcgagacgaacttcggctcgctgttcaacaacgcgaacatcaccgtctacctgggcggcatcaaggacgcgaaattcctcggcgagatcagccagctggtgggccagagggagatcgtgcgaggcagcgtcaacatcgacggcaccggccggcgcagcgtgaacaactcgatccagaaggagaacatcctcgacgtttccgacctgaccgaatggcccgtcggccgcgcgctgctgctcgcatcccaatcccgagcgcagatcgtcaagaccctgccatggacgggcaacaggcaatgggccgacgccctggcacaggccaaggcgaaagcccgagaagagcagagaaaggccgcataatgagcgaacacacctcgaacaccacgtccggccctgatggggaggaatgggagcgcgcggtcggtgcagccagaaccctgctgtcatcggactgcggatggctggaactgttcacccgcgccatcctggaggagaagggcgtgccttacggcaagggactgcccaaccccgaagcgccgcacatccccgaggacaaggagatcgaagaggaaaccatgccgggccaaggcgagccgacgccgaccgcacccgaggtgccggcaggccggcacgcggcggaacccatccgatccgggattccggccgatgccggggaaaccggcaacggctacgagaacccgccggaagacgcaacggaccgtgacgacacccctccaaaggacgatgcggaggaatccgacacccgtataccgcccgcgccggaggggaagacggatctcggccgagacgaatccggcgacctcgatcccgcgcgggcaagggacgtgtccggccagttcggcgcgcgaatgcggcgcagcgagacctactatccgaacctcgccgcgttcgtggaaaggttcgtggccaacgtgttctgctaccaccagagcgcatccgtgaacatgcaatgggtgagcgactggtggcgctatccggcgctcgtgttcccgctcgacgccatgtggcgcgcctacgagaactcgcgcaaggcacccggccagatgatgatcttctacatccaggcggcgtcgatgctcgaccgcgttttcgacaaggaccgtggcatcgtcgccagcctcgactgcaagcagaatctcaccaggaagggcgaaccgctgccctgcgaacgcccgaaccgggcatggcgcgaaccgatcctggaaacgttgtcggtccccgccgcaggcggcaaggaaaacaaggaaaccaccatcacgccaacaaggaggagaaacaatggctcaaactgatcccgaggacggcttcgaccagatcatggtccagagctggaacagcgtcgcccagcagctgcgcaccctgcacaacgagctgagcggcgaccgcgcgcgacgcagggaacgcgccgaacgcgccgtccagaacgaacgctacgagcagaccagacggcagcagcaatccatccgcctcgaacaatgggagatggacaacagggaacgcctcaacaaggggttcgagtccaccctgaacgcgaccgtgcttgccgacggcgacggctggaggaagatgcgcgactcgtccctcttgcaaggatggatggtcgccgaccaactggagggcaacgaccccggctaccgcaggcagatcatcgaggcgaaggcccggctgaaggacgaatggtcgaaacgccacccggaaacgcacatcgacgccgcagccgaccaattgaccaaccacgtgaacatcacctacaccgaccagtcgcccgcgttgcaggccaccctgaacgccttcaacacggccggcgtgcccgtggacctgcaacgggtggaggacacgcaggcgttccaggccgcgcacggcgacgacgccacgttcttcgtggactcgcggctcaccggccaatggacgggctacgaccacgacaggatcgtcgaagccgtgatgtgcgcgccggtcaacggcgtggacgacgccgcctcccgaatcagcttcctcaaggaccagggcctgccggaatcctcgcacgcggacaacaaggccacaggagacgagcccagcaccataagcgaggtcgaacgcaccgagaacgctgacgccgcgccaatcgtcgaaacccccacacccgtgcgggagcatacgaagcccgccgccgatgaacgcaaaccggcatccggacccgagcccgagaccacgggaggcggcgacctgacgaccggggagcccgacggatacgaggagatgccactcgacctgaacgaacccgaggaatggaacgggcccgacccgttcggcgaatacagtcccgccatggaatcctccatgaaccccacggaccagccgatacccgaccaggccaacgtctcgacgccgcagatcctgcaacccgagaccaacggcaacgcacgctgacgccgatgccggcgcaccccttgccatgaggttcgtggggtgcgccggcatcggatggccgtatcatggtgtcaacggctttcggaaccggaaaggacgagcatggcacacgtgacgttggatctgtcgaaatatgatgccctgaccgcctacaagggtcttcccgacgagaaggaggagaacccggcgcggttcttccccgacacctcgtcggtccgccgttgcgtgcgcgaacgcatgtccgtcatgggtctcgacgccgccgaactcgccaggagagccggggtccccctctcaagcgccgaagagctcgtggagaccggtctgacctccatccgctacgtgtacaggatgttcgacctgctgcacatccgcaccgaaacgctgccgtccgcctacgcggggagactgctgtgagggaactgcacgcctgggagaacgggcatcatgtgggcgtgttctcggaagacgacgaggagcgcatatcgttcgcgtacgacgcgaacgagggtctgccgatcagtctgagcctgcccagaaccggcggatggagagaccaggcaccgcgtaacttcctggacaatctattgcccgacaatccgaacgtccgccaggccatgcgtgagcacctgaatgcctcctcggccggcgtcttcgatctgctggaccgggttgacgccaccggcggactggtgttctccctctccccggaacctccaatcccatcgccgacgcttcgtctgatctccgattcccagatagccaacgaaatcgaccgcatcgagcggaccaggaactactggtgggacgaggacagccactgccggttctccttgggaggggcgcagggcaagttcacactgtcccgcgtggacggcaagtggtattggccggatatgatgctgccctccacccacatcgtcaaaccgaagccccatgaccttcccgaggcgaccaaggtggaactggcgacgatgcgattgtcggaactgtgcggcatcgacacaccggcacgcggcgagatcacggcgcagcgcaagacggcctatatcgtggaacggttcgaccgtcgcctggaggaaggccgaatcgtccgactgcggcaagaggacttcctgcaagcgttgggattgccgacccgcgacaaatacgatccgtcggccgatgactgcctggatctcctgcaacgcatcgatgcgtcgggttccctgtcctaccggtggctcgaaaggctggccttcaacacgtcgtccgccaacagcgacgcacatgcgaagaactattccctgatcctcgatcccgcatcggggatacgcctgtctccccagtatgatgcggtcgccaccaggtattggcccgagttcaattgggaactcaccatgccgttgaacgaggatcacgccttcgcggagcacaccacgccccaggattgggaggatctggcgacacgtcacggtctcgatggttcgagggtggcggatatggcccggcgtatggcggggaaggtcctcgccggcatatccgaatcctgcgagggcctggacgcgcggatggccgatcgcctgaacgcgtgctggacgaaggcgaacgagtccatcgagccgatcatgccgggagacgagccggcgaacgctctcgatccagcatcggctttgcccgattcgctcggttttccttcctcgggccgtaccatctgagctttttccgggaagcgtcctaacggcggggccggttctcctcgtcagaggcgaccatgctccatagaccgtattccggcgcgattccgtagcgttcgcgcagcatgtcgaacgtgtgcaggccctcgcgcatcgctgcccggtattcgtcgtcgtccgccgcgttgttgaggctggcggcgatgcagaacgcttcggatacgaggcgttccatgtcgtgcgtggacaggttctccaggtgccgttcgcgtccatcatcgaggaagggcgggcggttctccatcgcggcgcgccattcctgcacggccagggcgcggcttctggcatcgtccgcccagtcgtcgcgcagtcgtttcaatcgcatgtcgtcgccgagctcgaaggcgttgaaccgttccgtccacccgtccgtgctgcgccacgtgatcctgtagccgaccacctggccggggtcggtgaacgagtctttggcggttcccctgcgcagcctggggtcgatggagaagccttccctgcgcacgcggcgtatgaactcgtcctcgctgcgcgatgccttggcgcacgcctccacgatccggccgacatgctggcgcggcatcgttgaggcggcgaccgccgtgacgagccggcttctctcgttgccgtccaacgcatcccatccctcgtcgtcgccgtactcgtttcgcgccttccattcggcccattgacgccattgcccatactgccagctgacgcgcgtgccggtatcggaacgtgcgagctcgaccagttcggggcgtgtcttctccatccgcctgcatgatttctgcgcgttgatccggtcgtggtacgggtttatccacccgtcgtcggcggcgagctgcaccatgatgtgcacgtggtcgttgccgttggcggacagtccgtgacggaccgcgagccatgtgacgccctgatcgtcgtcgccgtcgatgatgttcatgcgcgtcagataatcacggatgacggcctcccattcctggtcggtcaggattccctgcccggccttgatggcaagcgagcagtgccacacgcgcttcctgccatgctctcgttcggggttgttcttgcccctcatgtcgggcgggaacggatcgtccttgcgttccctgacgcggtagcgtcggtcgaacctgcggcctatctccgcatacgacgccgccggcttgccatccatgtcaaacgagggaaacatgtcgccgctcgcgcacacgagatgctggtcggtgtgttcattgcgccgtcccttgccgaacaggtagcgcaccaggccggccgggtccgaacccctgacgatattcggtatcatacgatgattctccgcccgcgcgcccggcacggcggcgcatggcgtctatgagagatatgcgccctttgccggcacggccacttcgatagaattatcggaaacggataaggggctttgatggaaccggtgaggaacgatacgacgacggataggcgcacggccgtggaactggcgaagcggctgctggtcgatttgatctggcgcaccgccaagatcgaggttgatggcgtcaccttccccgacacgcaggaaatcttcgacgggcgcgcccccgagggtatgagcgtggacgatatagtcacggtgaataacatcaagcgcgcgtggaggttcctgctcgggaacatcgactatccagtcgattggcagtacatccgcgaatacaaccgcatcatcggcgaaggccgcgtgcgcgacgccggccgcttgcgtgaatacggcgtgaggatcggcggcacgggatgggtgccggaaatccccaccgtcgaatccccacaggaaagggttcgcggcatcctggaggagtcagaaggggaggacactgcgatgctgctgttcggcgcggtcacgcggggacaatggttttcggacggcaacaagcgcaccgcgctgatggttgccaaccaccagctcatacacgacggcatcggcgtcttctcgatccctcccgaagacaaggcacagttcgtctctatgctcctgcgctactacgagacgggcgactactcccggctctccgattggctctcacagaacgccgtcggccatgtgcccggcgggctgactttggcccaatcgtctggggccgcggaaaagacgaatgatgccgcgaacgggatgggcatcgtgcccggtgttcccctcgacggcctcgatggaggttccggcttactgaggtgacggtcgtggcgtccggggggtgctcccgaactccatgggattatttacggtcggcttgcgtgatgatgacttcgagccggcctataagtttccggcgctgccgcaccgtgtgcgcggccgttgcctcgtcgcgttcgctggcgtgcatctcgcggttcacgttgtgcgtgatctggttcacattgacgccgatacgacgaaccatggcgtctacgcagccgatgatttcgcggggtgtcgggccgcgcccttctcatgtgctatcctgggtttctcgggaatcggaggaaccgtatgagtgagatcaggatagcggatttgttcgccggcatcggcggcatccgcatgggaatggtgcaggcgctgggcgatgccgcgcacgtggtgtattcgtccgagtggaacaagtacagcgtgcagacctatgaggcgaactggcacgacgagaatcccgtggccggcgacatcaccaaggtcgacgagcatgacgttcccgacatcgacctgctgctcgcgggattcccgtgccagccgttctccatcgccggcgtctccaagaaacagagcatgggccgtcccaccggcttcgaggacaagacccaaggcacactgttcttcgacgtggcgagaatcatcaaggcgaagcagccgaaggcgttcctcctggagaacgtgaagaacctgctctcgcacgaccgtgggcgcacgttcaagacgatatattccgtgctgaccgaagaccttggataccacgtcacctacaagctgatcgacgcggcgggcttcgtcccccagcacagggaacgcacgtacatcgtgggcttccgcgaggagaacgggttcacgttcgatgacgtgaagcccatcgcgcacggcaacgtcggcagcatcctcctgcccgcctcccaggttcccgacaagtatgttctgagcgacaagctgtggacgtacctccagaactacaagaagaagcacgaggccgcaggcaacggtttcggatatggcatggtcgatgccgccaccgaccacacgcgcacgttgagcgcgcggtacggaaaggacggcagcgagatactggtctcacgcggcgagggaaagaaccctcgaaggctaaccccgcgcgaatgcgcgcgactgatgggctacccggattcgttcagtatcccggtatcagacacgcaggcataccggcagttcggcaactcggtcgcagtgccggtcatccgagccataggcgaggcgatgaaaccctacctgtccgactgattcgcccgaggcgtttcctgtccgattggtctatgctcatggattatgagcgattacggaagaatcggcgactacatcggcccggtcgcggccaagaaactgtcggccgtcgatatcgacgccaacagcagcaaccagcacgagttcggcggcaacgacgcgctcagaagactgctcggcaccggcgaggatcgtagatcctcacaagggcacggcatacccaccgcgctcatgtacctgagcgacgatgacgcaccggcggtcgccgacctcgaaaccacatggtacgacgcgcggcgcaacaacccgaaccgcagcgccgaatggcgtctctactacaaggactgcgagccaatccgcatggcccgccccggcgacctcatgtgcttcggtatgctcagggacaatcgcctgctgatcatcatcgcacagcatgacagcacggccgaagcccaagccaaatggctcttcggcatcgacgacgaacaggagggcgcgttccgcttccacgacaatacggaacgtgagctggacgccttcggcgcgcagatcttcgaagctctcggcatcaacgtcgaagtgcgggatgacacgtatctccccgagatgatcggcagatggggatacaggttccccagcaacgaggagttcgcggccttctcccaatcctccttgacggacgtggaccccacgcacgatgaccctgacgacgtggtgatcgaatactacgaccgcagctacctgctgttcaaactctatgagcgggcggtcatccaacacgactacgatgccgcgccattcgtatcggatggcgtcatcgacgttgactcgttcacttcgttctacacctccgtgcgcaaccggcgcatgagccgcgcaggcaaggtcctcgaaatccacatcgcccacatcctcgacgcgcgcggcatcgaatacgaggcgcaggccaagacggaaaacggaaagaaacccgatttcctgtttccctcgcaagccgcctacgaggatccggcgttccccgaggaacagctgcgtatgctcgcctcgaaaacctccatcaaggatcgtttccgccaggtcgccgacgaagccaaccggatcagggacaaacacctgttcaccctgactcccggcgacgtgacccatcccaagctcgcccaactcgatgaactgcacatccacctggtcatgcccaaggtggtcaaggaatcatacgacgaccttatccagggggagaccatgacgttctcccggttcatcgaggaggtccagggacttcaggcgggccgtcctcaaagcctgacccttctctgacggcccgacgggagtcctccctgatttcgccgacggttcggcgacggcggcgacgccgttcctgaagtagaattgacggaaaagcaaggagccacgatggatgtttcgatgatcagacggccacaggactggcctttccccatcccgcagatcacggcggagagcatagacgagctgatcgacgcgctgcaccgggacgtgtcggactcgactctgagcatctactacgacgccgtggacggatgcagccgcgagatggagaacgaggatcaggagatgatggtacgcgagtactacctgcatgacggatgggcggcgaagcatggaacgggtgcgtgatttctcgccgtatgagttgaaggtcagcgtgtatgacggggccgccgaaaagcgaaccatgctgatggacggccacctctacatggtcaagttcgggtatgacgccgccccgcaggaggagcatcccagtcgtaccagctacgtcaacctgcccgtcaacgagtatatcggctccaaggtgttcgccgcttcgggcatccccacgcaggatgtcattctcggtgattacaagggccgttccgtggtggcgtgccgtgatttcatgtacgagatggatccgaacctcatgctgcttcatttcaagcagctggaaatcagcatgcccggtggaagcagccgatcgaaggccaggcccgattgggagttcgtcagccaggtccttgacgaacatgacgcgctcgaaggcatccgcgcgcgggcgcggcaccgcttccttcagatgacatgcgtcgatgcgctgatagggaacttcgaccgccacgcgaacaactgggggttcatagcggacagaaggaccgcggatattcttgatctcgcccccgtatacgactgcggttcgtcactgtccccgagcctgtcccgtgaaggcatgagggaacgggtcgaggatcctcagcaaatgcgtgaggcgaacatggccgcaccctacatggcgatgaacgtcggcggcaagcgacgcaagttcgccttcttcctgacctcggagaccgcacgccccttcagggcggagctgccggaactctggccgcgcctgtccgaggaggtcacggaccgcatcgtggagcagacccccggactcgatgaccttcaacgtgatttctataaggccacgctggacgcccgccgcaagtacgtgctcggacccgcataccggatggcactcaaagaagcggaaacctccaccgccaccgtcgggaacgacacccttgcgaccgacatcgttccggggatcccgttccctggccttgggggaaaccccggtctcctgcactgaggactccacgcggctcacagtccgggaaggtcctcgttctcgccgtcaatcgttcccggatcgttcgatgacggtatcaagatggtcgattagttcccggcattgccggacggcgtaggacgccgatgcctcgtcctcgatggtcgcgttcatctccctgttcgcgttgtgcgcgatctggttgacgttgcggccgatgcggcgcagctggtattcgatctccttgagcgcctggacggtgggcgaatcgcgttcctcctccttgacttgcagtctcccctccaacagtttcacagcctcgatgatggtgagggagaccgtctggttccttttcttggcggcggtgcggatcatcccggcttcctcctcgttcaccatgagatgcacctggatggagcgctgctcgccccctcctttgctgctcctctttcgcattattccgattccttcctcattggccttcggcactcgggttgttgcttcagcgccgtagggcgcgggaggctgcgggctcggttcatgtacatgaaccgtctagcttgcttaccttcgatttgatgggcatctccatgtggatgtccatggacatatccatgtggatgtctatggacgtgtccatgtgggtatccatggacatatccatatgagcgcataggaaaacgcatgagggtggatgatcgttcggggtgatgccttcttccacgaatgggaaggggctcttcctttttttggaatgtcatcttcccgcatccttcgtcttgagctccttgagcagcatcgtcgcgttgtcgcggatgctcgcgtccgtgagcggggagagctcgtccgcataggagcggcagaggagcgcgtacacccgttcccgcacccaggcgctgcgcgcgatgcccagcttgaacgcggcccggcacagcatctcgtattcgtcgccggtgagcatgacattgagctggcgtccccgcttcagcggatgttcggggtcggggtcggtgcggtacacgtcgttccaatcggtggtgccgggggcgagttccgtgtagctgaacggctggatggcgtatctcacgaaacgggatttgggtatgcccgtcttggtggaggcctcggcaagcagattgaacagctcctggtccatgaggacccggaaggcgtggctgtatcgtcgcatggtttcatcgtctccttggtcgttgccgtgcccggcgcggcatggcgcgtcgggcacggatggttggcgtttggtcagcggtcgaaatcgaacgccgtgccgcgttccttgtcgatgcggatggccgcgtcgaacttcttcccggatttggatgtgaagcccttcagggtgacggcttgtcccgcgaggagcctgcgcgcggtctggtcggtgatggtcttgcccgcgatgcgcgcgaacatcttccatccgcagcctgcggtcgtggcccacttgccgtccttggtcttctcggtcttgttcgtggaacactgccacatccggccggttttcctgaccggctggccgcagcgcgggcagtcgccccattcctgcgcgtcggtgttcgcggttcgtgtgacggcatcggccttgaggttcgcggtcgcgtcggcggggattcgcaatgcctcccggtggaacatgtccatcacctcagacgggcctcgtttgccgtgttccacgtcggacaacgcctgttccatccgtgcggtgagcagcacgtccttcagtcgtggctccaccacgtcggtgaggcgttcgccttccgtggtggcgtgcaattgccggcccttgcgttccacgagtttggagcgcacgagcttttcgatggtgtccgcgcgggtggctggcgtgccgatgccgccggaatgtgattcgtcgtcatcgagtgccgccttgaggtttttgtcctccacgcaccggctcgcgtgctccatcgcggccagcagcgtggcctcggtgaacggtttgggcggccgggtctcgccttcctcgaccgtgaccttcccgaccgggcgaatgacgccgccttccatgaggttcgatgggatcacgttccttcctcccgccgggttcgcggtttcctcgtcttccggttcgggcccgtggccggtttcgacggccttccatcctgcggatacggtctcgtcggaacgactggagaactccctgtcggtgtcgtcggaaagccgggccttcacctcggtgacgatgtgcacatggtcgtcgcccacggcctcccacatgcggcgcacgatgcgtgtcatcaccttgcgctcgtcatcgtccaggccttccagcttcccggcgtccaattgcatggtcggcagtatcgcggtgtggccggccaccttcgcgtcattgacggccagctccgggcgcgggtgtccgggtatgccctcgcgggtgacgaacccttgggcgagacggccggattcgaggagcgccgtgagcgtttcgaggtcgtcatgcgtgatgtaccggctgtcggtgcgcggataggtggcgagtttgagttcgtagaggtgctgcaacgccgcgagcgtgcgcgcggcggtcatgccgtacatgcggctcatgtccttctgcaatccggtcaggtcatacaggcggggcggccggtcgttcacccgcctccggttcacggacatgatgcggaagcggccgtgttcggcctggccgcacagcagcatcgccgcatccttgctgtcgatccgttcgctggagagccgccatccgcccatgtccgcgatcacggtccagaacggcaccggtttgtggttcctgatctgccggtcgcgttccgcgatcatggcgagcgtcggcgtctgcacgcggcccacgctgaaccgtgcgttgtagagcagcgagtacgcgcggctcgcgttcatgccgatcagccagtccgccttcgacctgatctccgccgaccatgcgagcccttggtattcggattcgggtttcatcgcccgccacgcggcctggatggcctccgcctccaggctcgccacccacaggcgcagttccggcttgtgagagccttccatgtccgcgatgcggcggaagatggcctcaccctcgcggtcggggtcgcaggcgttgacgaggcaatccacatccgttcggcggatcagccgcacgatctgccggtagcgggagccggcaccgcgctcctcgctgatcttccaccgccaatggccggacgggtccacaggcagcgtgtccagactccatttcctccaatccctgtccttgtagtcctcgggcatggcaaggtcgatcaggtggccctgcgcccatgtcacgagcagctggccgcactcatagcatccgtccctttggacgggcgcggcgcacaacgcctgcgcgatggccgtggcgaccgatttcttttccgcgatgacgagcttcattcttcgttcgcgttccttccgttttttgggattccttgattcttgtccgacatgcgaggaccggcgcgggaatcccttcccggccggccctggatggaaaggcgtcgccaaggtcaggcggcgaagccgagcagcggcgcgaacacggcggcgatggccagcaccgcgatcagcatgaggatgacgccggcgatccacgcgatggccgtcaccagcgtgcggctccaggtctgtccgccggattccacgatcatcgggctgcccatgcgtttgccgatgatcgcgcacacgcccgaggcgaccacgcacaacagcacgagcaccacctggagcatcccgttgagctcgaccagccacgtccacaggcccatgaaccagccggcgagcatagagagaaacgattccattgattttcctttcacctgattggaacgacgcttccgattctcggccgcaaaacggccggccacggggcacggcgtctacacgccccgccttccgccatggggaatgtagacgccatgccccgtggaacgcgcgacgggaaggcagactcgccttgacggaaaaacgagcgaaaggaagatcgtcgtggcgaacaaccagaacaccatgcgcgacatgaaacgcagcatcctcaaggcggtgcgcgacagccagaagacgaaacaggatgcgatggacgagtacgtggcggcgcgcgtcaacatcaaatcattggaggaacgtctggaagaggcccgcgagaaggccaccctgctgcgcaggaaggcgaaggacgcgggaaacaccagcgccgaactgaaaacggcggacgacctcatagacgcgcggtggacgggggcggaagacgggtcggcggaagacgggtcgcccgaaaacgcggatccgggaaccgtgaaccccgagcgggagcatccggccatggaaggaaacacgcaaggcggcatgccgggtgagccgaaccgttgggaaggcggtgaatcgtgaaccggccggaaccgcgtccgctgccgaaaccgctgcgcgtcctgtgcctgttcgtcgccgcgctcctcgtgtgctcgctgggcgtcatcgtcgccaaccaccagccgtcaacggccggcgacgaccacggttccgcgacggacgcgaaacaggagtccacgggcaaaaggaaaacggattcgggcccgcgacggtacgccggcctggaggcggcgggaatcccggttcccggcgactggtctcagcgcaccaccgcgttccccgttgacacccacaaggacggcacccgcacgctctccgaaaccgcggacggcatcacgctgcacaatggttccggcccgatcgacaccgcattggaaacggtggacgcgctgctcgatccaaacggcagcgacgacgaatggcgcaagaacgtgttcgcgctgctcggcgacgacggtgccggggagagccatccggtctccgacgcgccgcgctggtggtggacccagcgccgcttccacgccggatccgtatgctcgggccaatacgatgacaagtacgtcaactacgcctacacctgcacctccgacggcaaatgggagggctcggatacggatgccatccagtcccagccgttctggacgacgaaggaaaccagcttcccgatcccggaaggcggcggaccgtcatccacgacggatccgcagcagaccgtcagccaggcgtacaacaccgtgctcttgccgatggacgacggcaactggcacgtcaccgtctactgcccggccgcgctcgacgcgtcattgctggacaaggatgccaacgagctcgaccccgatcaggtgaaggccggcgacgaggcgtacacggtgatctccgccaccggatacggcacggtccagcatccctgccggaccgtggaggtcgtggtcggcgggcagaagcccttctggtcgctgaggaacacgcaatgagccgggccagccgccatcggatcctcgcggccatgctctcggcgtgcctgctgtccctgctcggcggatgcacgccgttgaccgtgctcgcggtcctcggcggctgcaaggacggcggctccaacggatcgtcgggaggcgtcacgggaagcgtcacgaccggcgaggtgcatgacggcatgaccatcgcgcagaccaaggcgtggttcaacggatccgacgggcccgacaacgtgtgccaggcctatccggacgggcaatgcacatggtgggcgtgcatgagaggccataaaatcggattggacgtgggctcctactggggcaacggcggcgactgggccgccagcgccaccgccgccggatggaagaccacccgcaccgatcccgtggccggcagcatcgtcagctacccgcccggcgtggccgacgcggacaccctgtacggccacgtcgccgtcgtcgaggcggtcgaccggacggccggcaccgtgaccatcagcgagatgaacgggcgcggcggcctgggcatcgtcaaccaccgcacgcacaggatcgacgtcggcgcggtctacatcctgcccaacggcagtgtgtccaccaatggttccgccggcacggattccacgtcatccggttccgaatcgtccgattcgtcgtcatcgtccgactcgtcctcctcttcggatccggtggaggcggcatggacgtgctccagttccgactcgggctccacggacgtggtggtggactacgacggcgacggcacccacgccacgccggaacaggcccgggccatcgcccggaagatgatcgcctcgtacaaggactggggagacggcgactatgacgcgctcgtatggctgtggaacaaggaatcgggatggcagtggaatgccaccaacccgagcagcggcgcgtacggcataccccaggcgttgcccgcgtcgaaactcgcctccgcaggagacgactggaaggacaacgccgccacccagatcaaatggggattgaactacatcgccggccggtacggcagccccagcgccgccaagacgttctggctcgcccacaactggtactaaggagcgggacacgtaaagggaccgagcatcaaatctcggcggaatcatctgccccgtagacgccatgccccgcgcgaccgcccgtatgggctgatgatcggagccatgcccgccggacggcgcggcaccgatcatccaagggaaggaaggacgcatcatgctgatggaacccgatgaatacacgtcccaggaacgggccctgaccgacaaggcgaaggagctgatcgagcagcacgagctcgactggggcaacggggaatgcttcatccaacgcgacgccggccacagcgaactgtacatgacgctggaggcccccaaccacgccacggtcacggtcacggtgccggccgaggcggacgagaaggggctgaggcgcgccatggcggacgggctcctcgacttcgaccccgacgagaagttcgacgaatgctggtcccgcgagttcgcggcacgcaacgggttcacgccctccggcttcctgtccggcctccaggaagacaaagcgtatttcggtctccgatctgaggcgttgcttcatcccggtcaaagcaacgccgggcaaggcaacgaaacgattgcggagatccgctggacggaggaggaccttcggcactggctgaaagaccatgactggcccgacaacaacgagaacatggacgcgatgcgcgacatgatctcggccagggaattgcgggaccgcagcatcgaggagggatgggagatcatcgacgcgatggtggacgacggccggctcgcccgcaaagacgaaggcgagaaggccgaaacgtccgaaacctacgatcccgcgaacccggccgacccgttgagcattgccgatacgtctgcctcagccgcagccacacgataaaagacccgagcgaaggagcatcatcatggccgaattgaaggactaccagatcagcgtgtacgtcgccaacctgggcaaatacgtggagggcgtgttgcagggcgcgtggatcacgctgcccatgcccgccgaacgcttgcaggacaccctgaagaccgaggtgggattgggcggccggtacgaggagtacgcgatccacgactacgagggcggggaaggactgctcgccaccgtggcgaatcccggcgaatacgagtcgctgacggacctgaacctcatgtgccgcgcgttcgaggcgcgcgaggacgacgacccggacgtgtacgagaaggtgcggacggtccgcgacgatcttgacgcggccccgcgcaccccgttgcagtacgcgaacctcgcgttgaactcggacgagatcccctatcactcttatgatgcgccgttatggccggactcgaaggaggcgaagtatgcctggaccgccgtgaaccaggggtgggcatcggatgccgtgtggtccatgttcgatacggggctcggctatctgatcgatatggagatgtacggccgggacctcaagctcgacggcgatgtgtcgcttggcgacaacggctatctggaggacgcggactggccgagcgatatcgacggccggtactcgcgcgaggagatcgccgaggaggtcgaatggctggatgatttcgacgcgaagaccggttcgccggccgcgttcgacctcgcctcgctcgtccagccgggcgaacgcatcgcggactacacgatttccggcaccggcacgaactggggagccccctcataccagtgcatcgtggaggagggttccaccgatatccatgccgcgcttgaggacacgatgcaccggatcatcgacgcgcgcgccgctactggcgacgccgtggacgtgctgcgcgagaccatgggcgcaatgcccgcagcgtccgtcggcgaagacgacggcgtgagcccgatcgaccttgatctgggatatgtgctgcccggtgccgtcacctcgttcgcggaacgcgcgcaggcgtgcgacccctcggacccgctgaatatgaccgatacggccggttccggcctttccaagtgagaaagggcgagcgagatggccttgacgccttttgacatggagggtgtgaaccgcgacctgctcgcggccgggaatcccgccaagcccgacatgcaatccatcctgcgcaggaacgcgcgcgatctcgtgctggggaacgcgattctggtctcttccgccgatgccaaggaattggagttcggcgtccacatggcgtattccgacgcggacggcggcttcgacaccgatccgagcgaggacgtgtggttcgaggcgtcctcgctcccgattcccaatgaacgccctgatctgcctcccgacaacgcgctcaggatcagggtcacggacgtgctgaccgaatacgggttcacggacattgacgtgaaagccccggacaggacgccggaaggcatctggatcggtttcgaggccatgcagccagtcaggctcgacgtgacctcggcccaggaagggcgttccgtttccttcaccctgacagcagccgaggccaacgattggcgttccggccgtctcgacgcgcacggcctctcacgcatggccgtcgaacgggttctcgccaggccgggcgacacggtgacgctcgcctacggggattcgctgttccggccggcggtgatgtgcgacggttcgggaaggcttcccgagcatcgcgtcaaggccggtatcggcacgttcgtcatcggccgtgaaagcgaggcggtcatgcccgagatactgcggatcgaccgcactgttgacccacgagacccgctcgtgatcgaaaaggcgttcggaaaggagaacgacatggagaacgggaatgtccccgaatactggaaaggcctgatggacgaggccgatctgccgttggcgggcatcgtgcgcgagcacggcggcgggttgatggacttccaccgcatgaagggcatcgaacgcctgaccggttcgagtgactgggatttctactcctggacggtggaaaattacgacgatgacctgctcgacgtgtgcgaacgggagaacgccgccgacgtgctcgccgacttgcaggcatggtggaaaacgagccagcccgacatgcggcaacacgtggacgagatgatggcgggcatcgacgcggccatggaaccgctcgacaagcgcctgtacgccgccgccgaaaaggagttcaaggagcgcgcgttggacccggacggggaatgctaccaattggacggcggcacgttcatctcccaggaatcattcgacggcatctgcggcgaccaacgcgaccgctacatggcatggaagaaccaggccgaacccgccagactcgtgagcgcatgggacgaccccgcacgcctggaccggctcgtgggcgacctgatcgacacggacgatggcggcggatgcttctacaccgacgcgcagcccatcgactacacgcagggcatggattacagcccacagcagctggccgcagacagcgggctgggagatacggtcccgctggcgtgtgagtccaacgcttcctacagcctcgcgcaccaccccgatatcaaattcaccgccaccgggtctcccgacggcagaaaggcgctggaggtctcggctcccggttccgcccgtcatgcgctgatcacggccaaacccggaacgttcgacgtgagcctgcatgacgagcgcggcatcgtgtccggcgaatccttcccttacgaggcaaacgattcctggacgtaccggctttccggccaggcgttgcgcggcgcgctggacctcgccgtcggctgggccgacccacaggaaacgtctcttgagaccgcagggctcggcctcgcgttggatgacggcatggaaacgacacacggccgctgacgccgtacggcaacgacgaacagaaccaaggagcacacgatggacatgaattggatcgacgagattcgggatcccgaaccccgcaaacggtacatctacaacgctgacgactacgacccgcaatacggggacccgtattaccgtgaacacagcacccgcgccgacagcctgtggcggctgtacgaggagagcggcacgtcgatcacgttcgatgccttcgcggacgaatcccgtcaaaccgattacaggatggagaccggcgctctgcgtgatttcttcaatggatcccagtcggcgctctcctcgtacaggaacccgatgggaggcaacccgctgatcgcgttcggaagcataggccgatgggacggcgaacgcacgggcatatcctcgttcgagaccttcgatgatctgatgaacggcgatgattccccgttcaaggactgcgagatcgaccacatctgggacgagaacggaatcctgaagatgcgcggccaccaccacgacggcagtgtggaggtagagatacgccaggactgtccatgtgacgcgcctgcgcttgtagacttatggaagcatcgattaaggagccgatatgccgaatccagcgctgactgagaaaatccgaaaccttcctcctctcttggactctctggagcgggacgcggaggtgtccgacttgcttcgtcgttccgatgccgcccgagaacggttcaggcagatgtttcctttggatggggtggagcagtcagcgcttgaggattaccgtaaggaatggatggcccgctatgtctacaactccaacgcgatcgagggatccacgctgacgcttgaggacaccgaactggtgttggagggcgagttcgtgccgaccgactcgccggcaagatacatcttcgctgcccgtggcgttgcggatggcatggcctatgcggaacgattcgctgaagaggagcggacgctgagtgtcgagatgatccaaaagctgcatgaagtcaccgcattggacatgcagcccgcgctcaggggtcggttccgcccctacggctaccaggcaaggatcaccgccacccgagtgaagaccgccgacccacttgaaatctacgaggacatggaagcgctcgtggacgcggtgaacggttccaaagaccacccgatcctcaaagctgccggattccacgcgatgttcgagaacatccatccattcacggacggcaacgggcgaaccgggcgacagattctgaatctcatgctcatgactgccggctaccggcccgtagcaatcaaacatgatgccggccgcagctatgggaaaagtctggaagcatggcaggttgacggcgatcccaagccgttcatttcccagcttgtccaatgcgttgatcaggaagagcgcgccgtagcggaaatcgtcggcagattaagagagaaccctttctcggaaaacgccatcgacgggattggtctcgaagacggtccggcacgagggcgttccctctgattggaacgcttcaggattgtgataggtgtacatgaatatgcgtttttacatatattcatgcacacttatatgcatgaaaaggagcgaggcgattgaccagctgcgcgagatggatgccaagtactcgtgctacgtgtattgcaagaacgaactggccgtcgtgctgggtgagcaggggcagaaactgaaccgaaccctgtccagcctggtatcggcgaaggcgttggtccgtgccgcccgtggcgtctacgtgttcgcgtattcctcccatctcggcgaggggacacttcatcaggtcgcaaagcggttgcgttccggcgagctggtgtgggaaagcctcgaaagcgctctgtcgcgctggaacgtgatcagccagattccggtggatagggtcacgttcatgaccacgggtcgcgaaggcgagttccataccccgtatggggtgatcgagttcacgcactgcaagctcagctgggaccgcatcctgccgaacctgatcgcccgcgatgacggactgacgccgctcgcgtcgaaacagtgggcgtatcgtgacctgaaggccgtcggacgcaatctcgatctggtggatatggatgaattggaggacgacgatgactggaactgacgaaccgttcaagtacaaagccatggcagcacagatcgtttccgccgagggcatgggcaatctgcttcccgcggtcgagaaggaacttctgcgatgtcgaatctggactataacttgcctgagccgacaaaggcgcaattggagtacgcgcgttacctcagccgtttccaagcgccgcgtgaacgccggactcttttcgcccgcaccgaatcggatatcgcagccgccttccgtgaagagaccgcgaaccattcctggaacgccgacgaccttgcctcccaggccggtatcgatccccggtttgccgatgctctgctccagcggggcgaagccccgattgaagcggtgttctccgcagccgatgcgctggggatagacatagccgcgttgccgctttccagtctcgggaacactcggtgagcggtgttggtatacgccaatatgcgcaaagaagcatgttggcgtataccgtttgttcatccgatcctcgcagtgctaagggaataggtggcgacgccgccggctgttccgacgacctggttcatgggcatggtcagtctcatgtcggtgcgggtggtggattccacggcgttgcgcatttcgtcctgcacgaggccgatgtaacgcatggtagtggcgatgttggcgtgccccagcatacggctgacaagcacgatgttgcagccgttcctgtagtagacgcatgtggcgaacctacggcgcaggctgtgcgacgggtatccggttaccgtcttgatgcgtttcgccacgtaatcgacgccgcagtgtccctgcacgtctccggggaacagccagaccccggtgcgtttccgtaatgcagccgcgagccttgccggcacgggaagcatccgctccttgttgcctttgccgtggacgtggagcaccatgccctcggcgttctcctccaagtcggtcttcagattgatccgggtcatctcgatgcggcgtaggccgcagaacgcgcccagcatgacggccagccgcgcgtcctcgtcgggtgacgcgagtccttgttcgatgttctcctcgggacagatgcagccggacggaagggtcatgggcacggtgggcacttcgtccgccggattgcggcgcgcgagccctcgcttcatgccccactggtagaagaccttgacgcagctgcgcaccccgcgtctgccttcggttcccatgccggccaggtagaatatgaggtcgtcctcggtcacgtcggtgatgcttttatcgacggctttggagaatcgaacgatctggtaccagcgggtgcgcagggtgtcgttcgtgcgtccgatggcgtccatccagtcgatccatttctcgatggattctttccaatcctcccgtggctcgacgtgttcgcagctcttcctgttgtcgttccaatacctcatggggctccttaagcgcatagaaaagggaagtgacttcttcatcacttcccaaggaatactattgcgcgtttctggccgatgctcttcggaaaaccagctgcaaggcgaacatgcgcgatgacacgccgatttgaaggaacagcaaggctggtgtattgtctactcctgttgcaaaaagccctacggctgcgagccagaaccgtatatcggacggtcactggttcaagcccagtcgcaggagctcacctgaacgggtaactccggccgggatgaaaattgaatattcctgcgtagctcagttggcagagcatccgactgttaatcggacggtcactggttcaagcccagtcgcaggagctcacctgaacgggtaactccggccgggatgaaaattgaatattcctgcgtagctcagttggcagagcatccgactgttaatcggacggtcactggttcaagcccagtcgcaggagccatcgaaagcctcggttctccgaggcttttttattttcattgcattggtgaccagacacgacaccccatcatcaaccgggaaatccatggcgaagacctcaccactactcacatcaggcagacaggtcactgtcaattcaccgatgagaggcgcggtattcccagtatcagtttgggaataccgcgcaaatcttacatcgagaccttggtcaggggcatggcggagtcaatcgggaagtcgggggcgctgggggccacgccggcttcgaccaggttcacgccgagcatggcgaccatggcaccgttgtcggtgcagagcttgatttgcgggatacggacgtcgacgccgtagttctcgccgaattcgagcagtttggcgcgcagctgcgagttggcggagaagccgccgcccacgatcagcgtgttggaatcgtactgccggcagccgcgcatggccttacgggccagcacggtggccacggaatcggccagggatgcgcacacgtcgtccaccggaatctcatggccggcggcctgctcgctttccacccaacgggccacggcggtcttgacaccggagaaactgaaatcatacgggtgcgcggcaccggccttgccttgggtcagacccatcggcaccttgatggcgtgcgggtcgccgttctgaccatggcggtcgatgtgcgggccgcccggatacgggaagccgagcaggcgggcgaccttgtcgaagcactcccccgccgcgtcatccagcgtggtgcccaccacatcgattttgcgcggcatgtcttccacgtgcagcagcgaggtgtggccgccggagacgatcagagccagcgtgtccttggggaacgggccgaactgcagctgagtgacggcgatgtgcccgatcacatggttgatgccgtaaatcggcttgttcgcagcccaggccagcgccttggcgccggacacgcccacggccaggcaaccggccagtccgggaccggcggacacggcgatggcgtccacatccgccaacgtcatgttcgcgtcgacgagcgccttggacacgcatggcacgaaggcctcggcgtgcgcgcgggaggcgatttcggggatcacgccgccgtatcgcgcgtgttcctccatggatgaggccacgacgttggagagcagttcgcggccgcgtacgatggcggctgcggtttcgtcgcaggtggattcaatacccagtacaaccggttcgctcatcgtgcttctccgttcttctccgtttgcttgctggtgatgtcttcaatgtccgccgatgccgtctgcggggcggcaaagcccacgaccctaggtttcaggtccaagctcatggtgtatgcgtcgatgccttcgggctggtagtagcgtttgcgcaatcccatgcgttcgaatccgaaccgctgatacagggccagcgcagggtcgttatccacacgcacttcgagcagcatgcgcgaggcgccctgacgtttcgcctcgtcgaccagtacctgaagcaacgcagcggcgatgccttgccgctggtatgccttgcccacgccgatggtcatgagctcggcgtcctcgccgtcgtaccagaagccggcgtagccgcggacaacagcctgttccgcctctcccagcacatccagcagatacgtgcgggccggtgcgtccagttcctctcgcaccatgttcgcattccatgcgccgcggccgaacagttcgccttccaactgtgcgatggaacgaaccgcaagatcacgacttacggcagtgatgtcaacaatcatcggacacaacccacttcacgccttatcggcaccggcatggccgagcacgtgcttcagtgggttcggtacttcggcgtccggccggcgcaggtacaacggttcgatcggcacgacctggtcgccgcgcagttcgcggctcaacgcggtggtcgcaaagacggcgagcccggctttcccggcatccaataccgatccgtccaccacggagcccagcgcacgcagtccctgccagacggatgcgtatttggccgcgccgtggccggtcacatccaccacatagctgacgccgtcgcgttcgccgtgttccgcgagcgccgcgttcacccgttcgacgatatgctccgggtagtcgatatccatctcgatccagcgtcgttcggcggcgtcctcgtccggcaggctgatgctgccgtggttgagcgagaagtacagctgcttgcggcgcgcatcgttgacgcacagcgtgacgtggcggtcgagttcgtgttccttggcctcggcgtccgggacgtcaccatccgattggcgcgaactcaagcgcggcacgtcggccaggaaatcgatgccgtcgaacatggcgctgtcacccagcacgaagttcatcatctcgccttgcgggtcgagtacgttctgtccgacgagcttggccccggtggcgaaggccaacgccttggcggccacgatgccggcgcgcaggccggtgaatggcgccgggccgatgcccacgacgatctcctcgatatcggcaggagtcaggccggcctcctcgaccgcgcgcgcgatattgacctgcagtttctccacatgggtgcgcgaatcggtctctacaatgggctcgcgccccacaatgccgaccgtcgagccgaatgaggtgtcaatcaccaacgtgcaacccatgaatcctcctagtcgtaaagcctctagagagtgtacatcgaggagtctatgggcgcatggcttattgcaggtcgaacgcggcccatcgcttgccgactgggacgaatgcgacggtacgagtgccgttgctggtgagttcgccgtctgatccagcggatgcgacatcggaggaatcgagaggtcgatcgatatggatttcaagtcgttctggtgccaaggcggtggccatttgttcgccccactccataagcaccaccgtgttctcgccggggtcttcaagttcttcgtccaatcccagcgattccagctcgtccaacaaacgcccgatggcgtcctgccccggcgcataggctgagccgcccagacggtaggcatccacatgcaccagatgagccggagtgccgtcggcgaaatgcccgtcaagttcgcgggcaatggtgaatgtaggagacacgatgggttcggtaatgtccagccccgccccgaagccttgggcgaatgtggttttgccggcaccaagagggcctgagagcagcaatacatcgccgccgtgtaccattccggccacgcggcggccgagctcctgcatggcctcgctggtgggagccgcaatagtgtgttcgctcataaatacccctttatcgacttttaccgacctttatgactgatgtcttcaatgcagcgttccagcgcatataccgggtcgccgccgttcgttttgctttgctcatccgcccaggcgagcatacggatgcaatgcgcgagtcctgccgaagtccagccgccaagttggcgcatcgcattcttcagcacccacggattggttttcgcttcggcctgtgaaatcgtgccggcccggaccgccgaggctttggcaatggtacggagcttcatggccaacgcgccgatcaacgcgatgggatcggtcccttgttccacagctgcacgcatcatgacgatggcttcggcggttttgccttccacggccttgtctgccacggcaaaaccggtgacctgcggattggcggtcaaatactggttgacacagtcgagccccatcggattatcgtcaaagtcgaaacacaattgctcgcacatggcggcgagttcgccggttttgccgccgagcacggataccagctgctgcgcggccatcggttcgactctacgaccgcgtttctcgaattctccgagtacgaaattgagttgggcatccggtttcttcaaatccggcacgtcctctttgcgagcgccggctttcaccagttggtcgatgatcttgcgccctttgacgccgccctcgtgctggcagatcaccacgctggagccgttcggatccttggcggcctgcttggtgtacgtcaccaaagcttcggcgagcttttcgtcggcattctgcaggttgacgagtttgaccacggcaacgtcggaaagcaacgatgggctgacggcttcatcgaaggcatattggtcggccgatgtggcgtcgagctcgatgagttcggcgtcgggtcgcgccttcaacgcttgtgcgcacagtgccttggtgcgcgcgtcgttcaaatacgagtcgcctccgggcaccacggttaccggtacgttcgctgctgttttcgccatgcccccatctcgccacacaggttggacaatgacctgccggcataacggcccggcagcaccccgcgattaggcgtatgcctcatccaacagggcgtcgatatccgcgaaacgcttgggaccgggacgccataccgggtgaccggccgcgatgaccaatgccgggtgttccaacgcgcgcaggtcgtccagcggattggcattcagcacaagcaaatcagcggatttgccgacttccaaagaaccggtctcggcatcggcgccgagaatggaggcgttgacggcagtggctgcgtgcagggcctcagccggactgaaaccggcatatgcgaccagcagctccagctcacgccatgtggcgtactgcggcacgaatgtcatgcctgtatcggtgccgacgcctatcatcaatccggcctcgtgcgcctgacgagcacctgaaaccatgcctccgaccacattcttggaattctccaattggatgtcggtgatgccggtcgcgtcctgtccaagcaaggtcaggggaaggccggcggaaagtgtcggaaccagcgccgagtatccgcgcaacgcattcggattgtgccggaacatgccgatcaattcgtcgtcgagcacgctgccgtgttcgatggtatcgacgccggccagcagcgaacgccgcacgccttccgggctttgcgcgtgcgcgccgacaataacaccgtactgatgcgcctcatcgcaaatcgcccgcatctgttccacgctcatctgcggactgccggcctcgccgatttcctgtgcatcggttacgccgccggtcgcggcgattttgatggcgttgacgccagccttgagattctgcgcgactgcggtacgcgcctcttccggggtgccgctggtcagtgcgataagcggggcgccatggccttcgggaatcgccatcagcggtccggacgccaagatacgcggtccgaggatttggcctgcatcaatctgatcgcgtaatgtcacgacttcatatcccacgtcgccaagcgtgcggatcgtcgtaacgccggactccagcaatgttgtggcgttgtgttttacggttgcggccatgtacggcttgcccaatggcgaatgcgcgaatgtggcgaccatacgttggcctttgggcgtcgccagcttcggattgagcggcttgccttgggagaacagatgggtatgcgcattgatcagccccggcatcacgattttgccggtgccgtcaagatagtggtattcggctgggatactggtttcgatgctgggtgcaacctgttcgatacgtccgtcggctccgaccacgatcgtcatgttacgcagtatggttccggctttatctccggtgacgatggtggcgtgggccaatgcgaatggttcgactatcggattatgagacaacatcatcgccggcactccttcatgcagctggttgaactggtctcaactgtatcgcagttttgccggctgatggtttatgccgcgcggcctatcgcataggttcggctggctattgcgatggttgctgcaccgaataccgcattggctattcggcttgccgccgcgtaaagagacgtctcgtctcctcgcaccagagactgaggcggacacgccaagcggaaccgaagcgcacgccaggcattccggcctcataacgacggacatgctggaggcaacggctgacgaacaccagtagcatgccgataccgatttccaccgccacaatcagcacggcacccgtaacgccgtctttccatgggatgacggccatcgtgctgccacccagccacaacgccacccgttccatcaccagcgtgccccatgacgatatccacgcgaatacgccggccagccatggctcgcaccatgcgcaggccaatgccatcaatcccgccatcgtggccaatcccacaaacggcgacaccaacaggttcgccggcacggacagcaacggcaactccggttccatcaacacctgaatcggcagggtgaacaactgcgcggccacggtcatcgccatcatttcggcgatgccgtgcggcatcgctcgctcaaaggcaccggccagccgccccgcaaacagcacgatacccagtacggcggccgaagacaaggcgaatccgtagctggccgacatatccggattcaccgccaatacaccgattaccgtccagcacagggcgctcaacgcttgcgtacgccgccccatcgcatacgtcaacgcacctatcaatcccatgatgaacgcgcgggtgaccgaatcactggggaacatcgccaatgccagcagcacatatactccagagaccagcaacgccgtcagccgccgatcaagcagcatccacatgcataatcggcgcaccaatcccgccaccagtacaaagtggccaccggatacggccatgaggtgcatgatgccggactggcggaactgattctccaacgtttgcgcatacgtgctgttgaccggcatcggaccggtctcgccgccgatataatcctggccaagcacacccatcgtcaatcccggcaccaacacacgcccctgatcggacaattgttcggtcacggtgaaaaacgcctcctgcacatgcgcaatcgcggcgagatgccacggcggagcccgcacctgtgctaccggctgttttccttccaagagcagccatagtggtatgcgtccatatcgcgcttgctgcaatacgcctgtcagcagatggaccgcgcctcgacgcaactgcccacaatacgattcgtcggcgtatacacgcacagcgaccgtggaacgtacatccgtaccatccacagtgatgccgctcagccgtatgtccgtctgacaatcgtatgtgcgttggtccgaagcgatcacgggcgtcgtcaccgtggccatgacttcgtggtatgaactggattggcgagcttgtgcggaggcaggatcatgccaggcaatggtgtccgacgcgattgccgtcatactgccgatgcacgccaccgcaacgcatacggtcaatgttcccgtccaccggatccgcaggcggaaagacaccacgatcatcgccgccacggcagcacatgacgccactgttataggcaatattcgtgtgacaggccattccatgccgattatggtgacgtcaatgccagctccggcatcggcctttgcctgaccagtgccgagtccatcagacatcctccatgcgaataatgcgtgcgctcccagactcgccgcccacatcactatggcgatcggcagcatcctccaatcgcggctcccctgctcgcgcagtatccaatccctgctcatccgaccgtcacctgccctcgcatggtctccaacgtcttggagccgatgcctttgacatccagcagctgatcgactgatgtatacccgccaatcgccgtgcgatgatcaatgatccgctgagcggtaaccggcccaatacctttgatggattgcaattcctcagcggtagccgtgttgaggttgataagaccatgcgtggaagcgccggcatcgctgccgtccgtctgcatgtgcggagattgcgtggtatccgattcggggttcgctgtggcatcggaatgctccgactgctgcggatccgtgcgtttctcgtccgtggtgttctgcgatggcatcgtctgatctccagcggagccgcccgtggtctgcatggcggtcggttgagacagcatggccatattcatcgactgttggaccagcaatgccaagctgatgccaagggcgacgatcagcagcaatatcacggccaaggcatgcccaatggtgaacgacaatcgcggctgatcccgggtgagtctggctgattcgccgacggcatcggcggaacgtacgccaatcagatccgataacgcacgtttgtcacgggtcgcctgccgcaggccgctctgcgccctttggggcgggtggccagccggacggatccgtgcatggccaggaggcggcggaggcgtcgtgggccgttccactcgcggttggggcatggctgcgctctgcctgctgaatgcgcgcaaacggttggcggcatggtctgcgcgatggttatgagaaacgcccatgcatccacgctgatggattcatgggcgtttgtccagctgaaacggggtatgtggttctagcttatgaagttatccacaattgaggtgggcggttgacgctcccctcagtctcgctacgcgagccagctcccctcaaagaggggagctggctcgcaacaagtcactccgcgggaacgatggagacgatcttcggggccttgacgatcaccttgcgcggctccttgccgccaagacggtcggcgacggcggccagcgcctgcttctcgagatcggccggatcgatgtcgaccggcacttcgagcttggcgcgcaccttgcccttgatctgcaccacggcggtcacggtgtcgtggcccacgtagcgttcgtcggccaccggccacggctcggcggacagggattcggcgtgaccgagcttgctccacatctcctcgcagatgtgcggggcaatcggcgcgagcatcaggatcagcggctccacggcggcacgcggcacggccttcagaccggtcaggtggttgttgagcacgatgagcttggcgatggcggtgttcgggcgcatgccttccatttccgcggtcacttcggcaatcgtgttgttgagcagcttcagggtcttttcgtccggcgtgtcctcagtcacatgggcctggccggtggtctcatcgaccacattgcgccacagacgctgcaggaagcgcatgccaccgaccacgttgcgggtgttccacgggcgagactcgtccagcgggcccatgctcatttcgtacaggcggaaggtgtcggcaccgtagttctcgtacatgtagtccggggtcacgatgttcttgagggacttgcccatcttgccgaactcgcggttggcatgttcgccgttccaggtgaaggtcggctcgccggaggcgtcggccgggccttccacgacctcgtcggccggcacgtactggccgcggtcgtcggtgtaggcgtaggcctggatcatgccctggttgaacagcttgtggaacggttcggccgagtccacgtagccgaggtcgaagagcaccttgtgccagaagcgggagtagagcaggtggagcacagcgtgttcgacgccgccgatgtacaggtccacaccgccttcatcacccgagtacttgttgtggttcgggcccatccagtagtcgaactcgtccttctccaccatgtgcttggtgtcggtcgggtcgatgtaacgcatgtagtaccagcaggagccggcccagttcggcatggtgttggtgtcgcggtagtaggtcttcttgccgtcgcccaagtcgagctcgaccttgacccagtcctcgttgcggctcaacggtgcctccgggttggactcggcgtccatcggatcgaaggtgcgcggctcatagtcgggcacgtcgggcaggttgatcggcaatgcggaatccggcagcaggtgcggggtgccgtcctcgccgtaaacgatcgggaaaggttcgccccagtagcgctggcgggagaacagccagtcacgcagacggtagcttacggtgcccttgccgacgccggcggattcgagccaggcgttgaccttggcgatggcatcatccacgcgcaggccgtcgagcgacagcgcatcgcccttggcgtacgtggattcgacgtgggagttgatcacgatgccgtcatgggaaacgaacggcgccttgccctcgtagttggccaagtcgtcgccggaatccggcagaggcttgacggtgtagatgaccggcagaccgaacttcacggcaaagtcgtaatcgcgctggtcgccaccaggcacggccataatggcgccggtgccgtagtccatcagcacgtagtcggcggtgaacagcgggagcttcgcgccggtgatcgggttggtggcgtacaggccggtgaacagacctgtcttctcaccgccttcgtccacgcggtccttggcggtcttggcttcggcggcgagcctgtaggccttcaccgcctcgaccgggttgacatagccgcccttccagtcttcgggtacatcggccggccattcggcgggcacgttctccagcaggtgatgttccggggaaacaacggcgaacgtggtgccgaacagcgtgtcgggacgggtggtgtagatttccatgtccttgtcaccgtcggcagtggccacggtgaagtgcacggaggcaccatgggattcaccgatccagttgcgctgcatgagcttgaccttctcaggccaatcgatgccgtcgaggtcggcgatcagacggtggccgtacttggtgatgcgcatggaccactgacggagctcgcgctggaagaccgggaagttgccgcgttcggacttgccttcggcggtgacctcttcgttggccagcacggtgcccaggcccgggcaccaattgaccggggacttggagatatacgccaggcggaagtcgttcaagatatcctgctgctcggcggcagtgaggtcggaccactgcttgccatcggactcgtggccaggaatggccttttcgccggactcgaatttggcgacgagctcgacgatggggcgcgcggatcccttggagccggacgggttggtggcctcctcgtcgtaccaggaatcgtagatgcgcgagaagatccactgggtccaacgcacgtagccggggtcgatggtggcgaacgtgcggcggttgtcgaagctcaggcccatgcggtgcagctggcggctcatgttggcgatgttcgcctcggtggtcacgcgaggatgctggccggtctggaccgcgtactgttccgcgggcaggccgaaggcgtcatagcccatggcgtgcaggacgttctcgcccttcatgcggtggtagcggctcgtcacatcggaggccagataacccagcgggtggcccacatgcagacccttgccggaggggtacgggaacatgtccatggcgaagtaggcggtgcgcccctcggcgttgcggcccttgccgtccttcaaatcgccgttgacgttggccgcccagaaggtgccttgctcatcccagatcttctgccacttgttttcgatgtcctgcgccagtgcggcgttgtagcggaagttgggctcttcggtttgcgtgctcttctcgttgtcactcataaatcagcaaggtagcctcgcaactggacacgtcgtcaatcgttattcagcatccgagacgatggctttgggatcaccgttcagcgaaaccgtgagctttgtttggcttgtgaacgtatccttggcggccgtccagctgccatcctcaaccatgtcttccaatgcttccgcgattttctgcgccaattggctggtgccttgactcacggcgatgccataactgacctcgcccttgtccgcaatcacgtccatatactggggcccgttggccgcttgaagaccggaaagcaccgccatatcggaggctatggcatccgccgaccctacttgcacggccgtgacgcactgcgcataactgctacgctcctgaatccgagcctgcgggtggttgccgcggaagatgccgactgtctcgtcacctttcactgcgcacaccgtgccgtcgcctacgtcgcccaccgaacctgcgtcattggtgaatcggccacgctcatccgacctgaccagcaaaccgacgctggtcgtgaggtatggtccggcaaaatcaacgatcgcgctggacccatcggtgataggccaagaggcgacgaccatgtcgacctgtccattgtccagcatggagcgccggctttcggggcgaacctgcttgaagacgatctgcttgttcgcatagccgagtttggcggccacgtatttggcgatggtgatgtcgaagccctggtatgtgccgtcatgccatgctcccaccgatggttcgtcggctgcgaccccaatggcgatggtgggtccctccggcgctccggagacggtggtgacttgaatttggccgcaaccggccagaccagataatggcaatatcatgccaaaggccgcggcgaatcctgccatcagccgggaacgaaatccgcgccgcatcgggcggcgggcgcggagcacgctacggctggcgaacgatgaccaatggtgcataaccgtcaaacgccttacttgaacatgcgcgaacgtgtgaggaaccaggcgaccacaccggaaagcaccatggagatcacgatgatgagcaggaagccccaaggcttgtcggtgaacggcatgcccatcatgccgccgtcgaagttcatgccgtacatcgagaaaatcagcgtcgggatggacagggtgatggagatgatggtgaagatgcgcatcacgttgttcaggttgttggacacgatcgaggcgaaggcgtcggtcatgttcgcaagaacgccgctgtagatgttggccatctcgatagcctgcttgttttcggtgatgacgtcgtcgagcaggtcctcgtcgtccgggtattgcttgatgcgttgcagggtggtgagcttctccatcacgatttcgttcgatttcagcgatgtggtgaaatacaccaaagtcttgctcagctccatgagcatcacgatttcgcggttctgcatggagtggcgcagcttcagttcaagcttgtcgctttcgcggtcgatgatgcgcaggtaacgcaggtacatcgtggcgttgcggtacaggatctgcaggatgaagcgcgaacgcatgaaggtgttgaagcctcggatcgtgccttccatgaatgggtggagcacgggcgtgtcctgcatgcagacggtgatgatgaggttttcggtgacgatgatcgacagcgggatggtctcgtaccagtcgcgtccgccacgctcctccacggtggggatgtcgacgatgatcatcgtgtaatcgtcttcgacgtccacacgtgaacgttcctcgtcatccaaaggggcgcgcaggtcggccaggtcgatgccggtctgcgaggcgacggtggcgagctccacatcagtgggttcgctcaaacataaccaggagccgttttccggtttctcgatctgctccacctggccattgattgagctgaagattctcagcatgtcgtctcacccgccttccgcgctttcctactgttctatcgctgtacggttccaaaccgagattagtctagacccaccgttcgaatttgcgagcggggtttcgcatagcgaccgtcaccagacgattggctgccaacttggcatgtgcggtccgcgcagatcggtcggcccgttctcccagtcggcgctgtcggcgatggcgggagccttgttgtattcctccaactcccacaagggctgttcggcggggatgccgttgacgctgtggcgcactttgagccggcaccaacaggcgttgcgcatgccgccgagtgcgttcatgccgtccgggtcgagttcgagcaggttggagatggtggcggtaatccatgagccatgggtgacgagcatcagcgtggtgggcgtgctgtctgaataggcggagtcgatgaccagtgcgcgcacggcatcggcacctcgctggcccacggcggcacggctttccacaccatgcttggtttcgcccccagtgtgttgtttccaagaggcgtagtcgtcggctgccacggctttgatttcggcgcgggtcatgccttcccactcgccgaagctgcgttcacgcagtcgttggtcacaggtgaccggcaatcccaaaatatcggcgaaggcgtgtgcggtctgttgggcacggaacaggtcggaggtcatcaccaccatgcgccggccggcggcgggagcctcctcgaactgtcgcgtatcagtgcgttcggcggcgtcaggaccgggctgggcgatggcttcgggatgctcggcaagtcggttcaccttggcccagtaataccgtgaagcgagcgcgaatgcggtctggtcgacctgccattggcctacgatgtcgagcggcacatcgatctggccttgcaagcgatgttcgagattgtattgcgtacggccatgacgcagcatcatcacttcatcgatcatcggttttcgccacctcgttctcttgcggtttgccatactcatctcagcacaacccctagaatggcggcatggagatttctgagtcgacctgggcgttcatcgccaaacaccgccgtgaagatgtgcgtgatgtggccttgcacgccaaacatgatggcgacgtggatgtgccgttcgcgctggagcagattgccggctggcagcgcgcttcactcaagctacctgactgggcgtcccatgatgggctgattttcccgccgcaagtcccaatggaacaatgttccagccagttcacggctcaatacaaagcccggttagcacagcgattgttggacggggaagcagtcgacgacgccgacgattccccgacatccctagtcgatctgaccggcggtttcggcgtcgacttttcttacatgtcccgagtgtttgaccatgccatatatgtggaacaacaatccattttatgtggtatcgctcgccataatttcccgatactcggccttggccacgccgaagtcatcaatgatgattcaacagcagtgcttgatacgcttggccgagtctccatgatcttcctcgatccggcccgccgtgacgatcatggctcgcgtacctacgcgattgccgattgcacgccggatgtgctgaccctgaaggatacgctgctggccaaggcaccgacggtcatggtcaagctctcccccatgctcgactggcataagaccgtcgccgatttcgccggcgcggtgcatgaggtgcatatcgtctccaccgggaatgaatgcaaggaattgttgttggtgttggggcgcggccgttgcgcctcaccgctcgtggtatgcgtcaatgacgggcaggtgttgtcgtacaaggccggcgataacagcgacaatcaaacccctatcagcgattctgccttggttgcacgcaatacttgcaataccgaggatttcccggctgaggaaagcgcgaacggcttcgattcctcgcattggaagtacctttacgaacccaacgcctcaatcatgaaggccgggtgctttgatgttctcgaacagcgcttcgccgtgcatcacatcagcccgaatagccacctgttcgtggcggccgaacctattgccgatttcccaggcagatcattcgtcatcgaatccatcgtcaccatgaacaagaaagaactgaagcagctattggccggtctcacgcacgccaacatcgccgtacgcaatttccccctatccgtggcccagctgcgcaaaaaactcaaactcaaggacggcggcaacacctacctcttcgccaccaccgacctcaaaggccatcacctagtactgcgcactgaaaagcgaaaaagtggctccctctgacgaggaagccaccaatacgtcagctaatcagtccttggcgatggtcttgccggcggtcggaccggaggcaaggttctggatctcggtgacttcgagaaccggaatcacggccggcttcttggtgcccttttcctcggcgatcttgacctgctcgttgtagatgtcgtcgtcaacgtgcagcaccacgttgccgcggaagcggtagccctgcttcttctcgaggttggcgaaggcgatgaccagcggagagccgttcttgaggttctcgtagtgctggccggcggtgcgctcgtggtaggcgatgtgcgtgtcgtccagcacgaacagggacatcttcgggccgaggtccagttcgccgtccttggagacggtggtgatccaaccgaggttgttcttgatgaattccttgatttccggagtaatgactgccatgtcgaatcctttcatgattgctatggacaacgtattcttactctttccagagtaccggtttcgagcgcgactagcccggatgttcgctgtgagtaacctcaccttcgcacagctttcatccggttcttacctgcttggcgatgccgcgccccggccgcgcaccagccacacacctgtcacacacccgacgcccatcgaccggtcgattttggccggtagttcccgtaatctgtgagccgagagagccacaagttttcctaactgtcctgaggtgcaccatgggtttggtcgaacgtttcaacaagctgcgcagccgctggtcccgcagctttcccccgaatctcgcccgactcatgttgctgggctgcgctgcattatggggtggcagctatctgctcgccaaattcgccatggaggcgattccgccccaatggctgatgggtctgcgcatgatcggcgcctgcctgtgcatgctggccttgttccataagcacatcgtgccgtatctgacgccgaaaatcattgtgccggcgctcgtggtgggcctgacctactggggaacgatggtcacccagaccatcggcctgcagaccattgaaccgggccgcagcgcgttcctgacggccgcctactgcgtactcaccccgttcgccacgtggattatttcaaaaacccgtccgaaggccatcaatcttgtcgccggcgtgatctgtctgatcggcgtcggcttcgtctcgctgaagccgggcgggtcgctgtcactgagcgccggcgactggctgaccatcgccaccgcggtcatcttctcgttcaatctgacctgccttggtgtctacaccaaacgcttcgaccctatcgccgtcacttttgtgcagttcggcgttgccggcgtattgttcatcatcggcgcgttgttcaccgaacccatgccgaacgccagctggctggcaccctcagtagtggccagcgtgctctatctgttcctcggcgccacgatgagtgcccagatcatgcagaacatcggtctggctcacgtgcctgcctcgcaggcgtcaatcatcatgtgtacggaaagtctgttcgctgtcacgttctccgcgctgttctggggcgagacaatcatgtggagttcactggtgggctttgcgctgatcttcgtcgccgtgctgatgtcggtaatcaagccgaccaaacagtcgctgcaccggaactgacgattcagtttcggccatggatgatcatgggttctccattgccctgaaccgttacggtgaaggccgaggctcttgaaggcgtgcaatcggaaatcggacttggcatcgccaaactgcatttcgagttgggtgccggcaacggcagcttcgcttgggctgcatgacgttctgctgaacgtcgttttcgctccaagcgaaccaatttcggttgttctttgcgctactttgcgccactttgcgctgattcccactgctcatcggcaccatatttttgagtcattccacattccgctggctaggttttgaaggtctcgtgtaggcatcctctcggtatcaccgagccttaagcaaccttccagcccgacactttacggtcgtgtcttgtgaagaagtttttcgaaggtctttccctctcatccatcgtggcgggcacccttgccgccgtcacctcattcttactggcatcgaaaatcggtatcgccggctcggtaatcggcgcggcagccagctacatcgtctccgcggtggccaccaaaatctatcaaaacatactcaccgcctccggtgagaaactacagtcggcctcgtcttccggcaatgacgatgacactacggataataagtccgataaggcagccgaatccgagtccgatacgacgatgaccggcatggtcaataccgtttccaccgcgcgcaagccgcgcgaagtcgtgtccaatcgagcgaacggacgaacctattcggtcaatgaactgcgcaaggcccgctcccataattcgaagcgcaccgccattatcgtcacgctggtatccggcctgctcgccgtggcagtaaccgccggcatcgtcatgctggtcacgcagggccgtggcacggaccatatcatcactccgtccaccacgcccacgcaaaccgacaccaaaacgcagaccgacacgtccaatcagaataacggactgccgcagccgggcattaccgacggttcgaatgattccaacaccaaggactccacatccggctcgtccaacgacggcaccgattcaagcacgtccggctcaaccggcaccgactcctcaaccgattccaacaccaatggatccaccgatggttcgaccggcaccgattcctccactaattcgggcacgactggcggttccaccggttccggcaccaccggaggcaccaccggcaccggcaacggttcaaccggatcgggttcaggatcagccaatggctccggttcctcttccagctccacgggcggatcatccagttcaaactccggtaatagcggttcgagcggctcctcaaccggtagcagcagcggaaccggcatcaaattcattggctgacaatcgccgactcgatagcagcgatggcggcaatgccagtcaatgacgtggggcaatgagaacatggaacgtatgactaccatcattatgaatacctctgagggcagcatcaccatcaacctgttcgacgacaaggctccgaacaccgtggccaacttcctgggcctcgccaccggcgagaaggaatgggcggacccgtacaccggccagccttcccacggcaagttctacaacggcctgaccttccaccgtatcatcaagcagttcatgattcagggcggttgcccgctgggcaccggtaccggcggccctggctacgagttcgacgatgagatcgacccgagcctgaagttcgacaagccgtacctgttggctatggccaacgccggtctgcgtcgcggcatggacggtaaggtccatggcaccaacggctcccagttcttcatcaccaccgtgccgaccccgtggctggacggtcaccacaccatcttcggtgaggtcgccgatgacgactccaagaaggtcgtcgataagctcgaagcactggacaccgatccgatggatcgcccgctcgagccggccgtgattctgtccgtggacgtggcggagtaagaccgacaacatatacgaaaaggtcctgattctgaaccgcaccccgattgttggactgaagtaattcagattcgatgatcggaggtgcggtttctcatgtgtagggatcgcaggcgtcattacgatgacggtttcatgcgggtcgtcgccgacctgatccggggcggggccgggaggcgttctctcgcccgccggcttggcgtgcccgtcagtaccgcgggaaaatgggtgttgtcataccggtttggcggggaggcggcgctcatgggagaacgcgaaggcaacaggagatacgactacgagacgaagctcgcggcggtgcgcgaccatgtggagcatgggctgacgaaggccgaagtcatggagaagtacaggatcgcgggtcccgccccgttggagcgctggtgccgcgagtaccggtccggcggcccggacgcgctgcgtccgaaaccgaagggcaggcccaggggcgcgaaatccaagccgaggccggctcccacaagggaacagctccttgaggaggagaacgcgtacctcaaggcgagggtcgcgtacctggaaaaagtcgacgccctgctggcgtggagatcggcaaccgggacagaacggtgatcgtctccatgctggcggggctgggacatcggctccggcacctgctcagggcggccggactggcgaaaagcacgtattaccatcttctgtcgcatccggccgccgtgacccggccggacatcgagccgatggtcgccgagatattcgcgcgcacgcccaacgggtgcggccaccggcagatacgcatgtgcctcgtgcacgagttcggggtgcgggtgagccacaagagcgtgctgaaggtcatgaggcgcatgggcctggaatgccggatacgcaggccgaacccgtaccggaaatacagctcgtaccgggacgagacgggcgcgagggcggagaacctgctgaaccgcgacttcacggccgaccggccgtgggtgaagctgggcacggacgtcaccgagttcagggtcgccgacggcaaggcgtatccggctcccgtatacgacatgggatccaaggagatcgtggcctgggacgtcagccggcatcccgacatggcccagcagcggcgcctgctcgccatgctcgaggagaagctgcccgaagacgccagcccgatcctgcactccgacatgggctggcagtaccggcaccggtggtggcgcgaccggctcgcgggactgaacatccgccagtccatgagcaggaagggcaactgcatcgacaacaccgcgaccgagcaggtgttcggccacctcaaggacgagttccacgccggacgcgagttcgcctcatacgaacagttcaagaacgaactggacgcgtacatcatccactggaacaccaaacgccgccagatacgactggagggacacaccccggaggaattccggaacatgtccctcacagcctaatcaggtacccttaataaaccacgtccaacaatcggggcgcagttcaggtattccagtcaggaccttttcgtgttcttggctcccctctctgagagggagccagagtaaggtaacggcctacttcatcttgcgcagtcgaggttcggcggattccttggcaccagtgatgcggtacacgtcgaacacgccatcaatcttgcgcacggctgccagcaacgagttgagatgctgcggatcggccatttcgaagctgaactggctggtggccacgcgatcggaaccggtggcgatcgtaccggaaatgatgttcacgccatggtcggaaagcacacgtgtcacgtccgaaagcaggtttcgtcgatccagcgcctcgacctgaatcttgaccatgaacaggcccttggtgctggtccattcgacttcgaccacacgctcaggctgcttgtttttcagatcgatcatgttctggcagtcggtgcggtgcacggatacgccctgattacgggtgatgaagccgatgatattgtcaccgggcaccggcatgcagcaacgggccagcttgatccacacatcgcccacgcccttgacggacacgccggtggagctgctggaggccttgcgttccatgggcttcagcggcaggacttcctgctcgacttcctcatcgacctcgtcggcacccgcatccttgaccagatgcgagatgacgttctgcgtggagacctgtccgtcaccaatggcggcgaacacggcgtccgcgttcgggaagttaaggtcgtcggccacaccgatcaatgcctcggtggtcagcagcgcattgaccggcaagttacgtttgcgcatagcgcgggtcagctcgtcgcggccctcctcgatggcttcagtacgacgttccttcgagaaccactggcggatcttgtttcgtgccttcgggctcttgacgaagctcagccagtcgcgcgaaggaccggcggtatcggacttggaagtcaggatctccacggtgtcgccgttgtcgagcgtggtgtcgagcggcaccaaacgcccgttgacgcgcgcgcccatcgtacggtggcccacttcggtatgcacggcataggcgaaatcgaccggtgtggcatgggccggcaaagagacgatcttgcccttcggcgtgaagacatagacttcggacgagccgaggtcttccttcagggaaccgaggaattcgttggaatctggggtttccgaagtccaatcggcaagctgctgaatccatttgagattgtcggcttcggaaagctcctggttcttctcgtcacgcctgcggtcggacttgtccggcgagctcaaggcgcggccggcctggccgttttccttgtatttccagtgcgcggcgatgccgaactcggcgcggcggtgcatgtcccaggtgcgaatctggatttcgaccggcttgccgcccggacccaccaccgtggtgtgcagcgactggtacatgttgagcttcggcatggcgatgtagtccttgaatcggccgggaaccgggttccaccgcgcatgcacggcaccaagcgccgcatagcagtcctgaatggtgtcgacgatgatgcgcacaccgaccaaatcgtagatgttcgcgaaatcatggccgcgcacgatcatcttctggtagatggagaagtaatccttcgggcgtccggtgacgtatgccttgatgttctgctcgtcgagatcctcgttgatctccgccagaatctgcttcaggtacacatcgcgctggccggctcggcgagccaccagcaccacgatctcgttgtagatcttcgggtagagcaccttgaagctcagttcctcgagctccgtcttgatggcgttcataccgagtcggttggccaaaggtgcgtacacgtcaagggtttcacgcgccttcttctgggcggacgtggtcttcacatagcgccaggtgcgagcgttgtgtacgcggtcggcgagcttgaccaccaaggtacgcacgtcgcggctcatggccaccacgagtttgcgaatggtttcggcttgggcggaatcacccacttcaagctgactcagcttggtaacgccatcgaccagaccggccacggtgtcgccgaattcggcgcggcattgatccaacgtatagtcggtgtcttccaccgtgtcgtgcaacaggccggctgccaccacgatcgggcccatgcccagatccgcgagaatctgggaaacggccagcgggtggatgatgtacggctcgccagacttgcggcgctgggcggagtgctggatgacagcacgccggtaggcacggtcaagaatggacaaatcctcatcggggtgatgggacttgcacaccttcttgattggatccagcggattgagcggatcggcactgatctcacaacccaacttacgggcggcgtactgctcgccatcaatctctgccatgccagtcacctccctcgtcatgaagttcattgtagccgcgaaccggagccttgtgcattcacctgttcgccatcattggttccacaaccgttgttgccgtcatcaccttagtcattcaaccggcctaatccggtcaggacgccactcccgtcgaaccgaacccgcgttcggcgcgatcggatccgggcagtgtctcggccgggatgaaccgagcctcaacataccgctgaatcaccaattgagcgatgcgatcgcccggatggaagacggcggtgtgcttcggatcgaggttgatcagcggcaccttgatctcgccacggtagccggcatcaacggtgccaggcgcgttgagcacggtgacgccctgcttggcggccagcccggaacgcggatgcaccaacgccacgtagcccgcaggtagggcgatggccacgccggtgggaaccagtgcccgttcaaaaggcttcagcgtcacatcgacggtggtgatgaggtcggcaccggcatcgcccgcgtgggcatagtgcagctgggccggatgttcggggtcgaggctcttgaccaggacctcggtggattcgggctcgttgtaggtctcgtcgaacgccatcaggcggcgcactcctcacacaccggctggccatcctcgtccgtgtaggcgagctggctgcgatgcttgaccaggaagcactgcgagcagatgaactcgtcaccctgcatggggatgacggtcaccgaggaatcctcgttgctcaaatcggcacccggcagttcgtagtcttcggcgatggcgttctcatcgtcgtcgatgtcgctcgaggcgttctgcgaggacttccccagcgcctgcagcgattcctcgtcctcatccttgttgcggggggaatcataatcctgagccatcatggtcctttcgtcgtctttggttcgtaagtcgatatatatagcacggtcagcgccgtactcgcccataggatacacgatttgaaatactcgtaaagttcgacacgtggggcatacttaaaagaaataatgtctttgcgacggaaagtggtgcgaatatgccagatgatcggcttgaaaaagcccgtttcgtgcgcgtgagcaagacgggggacctcgtattctcccttggcggcagggaaatggctgtgagcgtggacgacacgctcgaacgggcgattcttgaggccaagcaggtcagaagcgagatgcgacaggctccccagccgcatcagcagtccactttgccgatttcccagatacagtcgctgattcgcgccggtgccgatccggcccgtgtcgcggagaaataccatctgagcgaaatgctggtacgtcgtttctccatggctgtggagaccgagaaacagtatgccatcgaacagttccttgccgtggcggcacccaaagacagcagggtgcgcaccatcagcgaactggtggaacgcacgctggcctctgcgggaatcggcatggaatcagtgacctggaaatccacccgacgtggacttgagccttggcgcatcgtggcgatattcacttccgcgggccgtgagatccatgccgaatggacgtggaatatgcacgacaattccgtgatgagcctgaacaatgccgctcgaaaactgctcggcgaacagaatccggaatcagccacggattccaaactcaagccgacgattcccgaactgcccggcgactccgtacgctccgcgcgtatcgagcgcgccgtgtctgcttgggcggctcctacgccttcgattccggccgcacggcctgccgcaatccggccctctgtcacttccacaggttccatgcccccagtggatctatccacgtccatctcaccggccacgacccaggctcatggcactacggcccccagtccggtctcttcgcagaccgccggatctgtttcgccatctgccgcaggattacagcaatcgcctgccacggcaccagagcagggctctgacaatgtttcggacaagaccatacggagtggccccaatgcacagctagtagccaccgagcaggagcgggcggccgaatccgccgccaccgaacatgaggcaccagccaaaccggccaagcgtaaatcaggacgttcggccgtaccaagctgggacgagattctgttcggagactgaatttccgaatcaggccatatcgatcaggcagggaatatccatttccaatgctgtttgggagccatgcacgctcggcaggtgggtggccttgtctccttgcgtacgcgaatcgacgagggtcacggctcccgctgcctgcacgaccacatcgccgagcattggccggactcgctcgcagaccggtccaaacaatccgtccgcgatggcctcatccttggtccgcaccaaggctcggtcttgcagacaatcgcgccaccggcaagctatatcctcaggtcgttcatccggctcggcatacagcatcagcgagcgcggctcccccccgaccagtgacacgcctcgggtgagctgcggttcaacggcgatgtcaatccgctggtccatgtcggtttgcaccatgccgtggtcggctacgatgacgatcagcgtgcctttgggtgcgctgcgtttcaggagcgcgagctgggcgtcgatatgttcgaatgcggccacccagtgttcggaatcccacccgtaattgtggccgactttgtcggcgtcacggatgtacaggtaggtcaggccgggggtgcgggaggcgcgtgcggcggccagcacacgatcgcgtggggtgacgttgccttgatagtcggtgcctcgcaatgcggcttcggtcaatggcgatttggagaacttgggcaaccccgagctcgtgacgcgcacctcttgagccgcaagtttctcgaacaccgtctcctcgcgctgcaggtcgagcggatcgaccatgggcggcacaggaatgtgcggattggctggtttgggtgccagcgcgtctttgaactggatgagttggatgagcttatggctggcgggttcgagctgcgtatagcccgccattgcggtcagtcccgggcaggttccggtaccgaatgcggccatggccgccacagtggtgcttggagcgcaggtagcgatgggacgctgattggcgctttcgttcatcagcgaacgcagatagggcgcgtggccgaggcgcatggcgaggttccagtagcccaggccgtccacgagcaccacgatggccgattcggcatcgggcagccccaatgcgcgctggcaggccttgggatcggcgtggaccttggtgggggtcggatgtccgatggcggcggacaaggcgggcagcacggcggacaggtgcagtgctcccccacgccgatcggccggggcgtcatccccatagcccactgtgggcaccagccgcagcaactcgtccatatccggcgtctcaacactcatagttgcccattcaagtagcacccctccccttggctcagtgcgcagagaacggttctcaataacaactgtgcgctccaacgcacataatcaaacaaacgcacatcgactgaaacactggaatcacgccattttatcggcaaacatgtgcgattggcgcaccgaaaccagcgcacagttgttatcgagaaccgttctctgcgcactgtttcgcgccctcccgctaatatgggggcgttcgaaagggagtttcatggcatcacaccgcaaaccgtccgcgcaaacctatgatccgcgcacggtcaaggagcatatcgtcgagacgccgctgaacgaggagatgagcaagtccttcctcgagtatgcgtattcggtgatttacgcacgcgcactgcccgatgcgcgcgatggcttgaagccggtgcagcgccgcatcgtctaccagatgggcgagatgaatctgactcccgaccgcccgtatatgaagtccgcccgcgtggtgggcgaggtgatgggcaagctccacccgcacggtgattccgcgatctacgaggccatggtgcgtttggcacagccgttcgcgatgcgtctgccgctggtagacggccacggcaacttcggctcgctggatgacggccctgcggcctcccgttacaccgaggccaggcttggcccggccgctctcggcatgaacgcggatatcgatgaggacaccgtcgacttcacgccgaactatgacaacaagctcaaggaaccgaccgtgctgccggccgccatcccgaatctgctggtcaacggcggctcgggcatcgccgtgggcatggccacgaacctggccacccacaatctgggcgaggtggtaaacgccgccaagttcctcatggcgcattcggacgccaccctggaacagctgatgcgttacgtgcccggccccgactggcccaccggcggcacgatcatcggccgcgacggcatccgtgaggcctatgccactggccgtggtacgctcaccacgcgcgccgccacgcatatcgagcatgtcacggcccgcaagcaggccatcgtggtcaccgagctgccgtacatggtgggcccggagaaggtaatcgaacgtatttccgacggtgtgaagaaccgcaagctggaggggatttccggcgcgttcgatctgaccgatcgtcataacggcacgcgtatcgtcatcgagatcaagactggtttcgacccgcatgcggttctggtgcagttgttcaagcacacaccgttgcaagacaacttcgccatgaacaacgtggcgttggtggagggccgcccgcacacgatgggtctgaaggagatgcttcaggtgtgggtggaccaccgccgtgtggtgattcgccgccgcagtgaatatcgcaagaagaaggcgctggagcgcctgcacctggtcgagggcctgctgctggccatgttggacatcgacgaggtgattcaggtaatccgcacctcggatgatgcggatgccgcgaagagccgtttgatggtcgttttcgatttggacgaggtccaggctcagtacatcctcgacctgcgtctgcgccgactgaccaagatgaaccgtatcgagcttgaggccgaacgcgatgatctgaagaagcgtatcgaggagctgacccggatcctggcctccgccgaggcgctcgaccaggtggtcaccgacgagatggacgaagcggtcgccaagtggggctcgccgcgccgtaccgtgctgctggatgccgacccggatggcacgttgacgccggtcgtggcgcagggtgccggggcttcgggcgtgtccaagtccgcgctcgaagcggtgaaggccgccactacgatctcctccgccgaagccgatgtggccgcagccgcagctgcggccaagaagaccggcgaacagtccacgctgaccggagccttgaagatcgaggacgagccgtgcgtggtgatgatgagcgctaccggtttgattgcccgtaccacgccaagcgcgatggacgtgttcaatgcacgatccacttccgatgagcgtttgagagacgatcagatcaccacaatcttcgagacttccacgcgcgctacgtatgggctggtcacgtcggccggccgcctggtgctcgcgcatgtggttgatttgcctgccttgcccgctaccgccacattgtcgctgaagggaggagttcaggccgacgaactgatcggcatgaccgaatccaccgatccgattcgcggtgagcgtgtgattacggcgattgccatggagcagccgacgtccggcaagaccagtgccaaggacgagagcgaggatggcggggccgccgaggccaagccgttgccgtcgctggctatcggtacccgtaacggtgtcatcaagcgttggaatcgtgaggcacccaccaccatggattcttggcccgtcattgatctgaaagatggcgacgaagtggtattcgccgccgtggccgaggatgacgaccgtctggtgttcatctcctccgattcctcgctactgacctttgaggcgaagaacgtgcgcccgcagggtcgtactgcgggcggtatggccggcatcaagctggccgagggcgcccgtgtggcggccttcaacgtggttcccgccggcaaggtggcatggacctatgaagagggcgagaacggcttgacttccggatccggtgcagtggtgctcaccgtggccggcgattccgatgcactgcccggcaccgaaaacggcgcggcgaaggtcactccgctggaaatgtaccccaccaagggtcgcgctaccggcggcgtgcgttcccagcgattcctgaagggccagaacacgctgattcttgcctgggtgggcctctacccgttgcacgcctctacatccgcaggctctccggtcgagcttcccaagcccgatatgcgccgagacggttccggagtagacctcgcctcccccatcgccttcattgcgtaacctcaattaagctccctctgatgggccgagccgtaaagcaaacaccccagtggggtgtttgtaggcgaggagcgaacgatagtgagccaaacaatagagaagagaccctaaacccggcctacactaagcattaaggaggtggcgatgagactactggttgccgtatccaatgaaccgttggcccacgccattcatggtgccctgcttgccggtcgtcatgaggtgtctttggcaagcaccggtagtatcgcgctcgccgctgtcgccaaggagtcatttgacgcagtgattcttgatgaatccctgctcggcatttccaccgagcagctcatcgaatcccttggcgagcgctgcctgacgagtacgcccctatcgaagagacgccctacagctccttcagcgcggattcacgcgcaaacaactcagatgccgaagccgaacaacgctcggacaatgccgacgctagcgcacaagctaacgcacgacacccggatgtcgtgctgagcaaaccattctccgatggcgaactgctctcatacgtcggctcgcttgccaccgactcccccgtcatgatcattcgtggcaatctcacgttggacaccacgaatcacaaggcctactacgcatccactcacagcgcaatctcactgtcccgtctggaatacagtttgcttgaagcgctggtcaaggctgatggccagttcgtcaacaccaacgagttggtcaaacttatcggcggcccattcttcgagcaacagggcttactcaagaacgccctctacacactggataaggagctcacccgcgccggcctcatcatgacccaacgaggctccaactaccgcattcgatagctgggctcaatcagtacagccgcatgccttggggaacgggggtgaagccggactggtggaggatgcgggcgaaggggtgacgggcgttgaggggttcgccattgatgtcgctgaatgtcacggagccggtgccattgcgtttgagggcgtaggccagttctgtggcggccttgcgcatttgttcgtcggaatcattgacagcggcttcatggccgaccgattgatcgaacgctgtcaggtgcttggctttggcggccgcgtatagtagcgcgccttgcgcattgagcacgaccgtggctccgatacggcgtgccggtttacccgcaccggcaggcgcgtccggccacgcgatggcggagccactgagatttgcggggtcgagcacactcaatgccaccacggactggccacgatgctctgacggatgacgcaacgcatccacggtgtcgcgctcggcaaattgggccgcgccgaaaccacggacgaacatgcctcgtaccagtcgaccatgctcctccatgcgattcaataccggatacaacgctgagtagccacccgggatattttccttgtcaatcaccggctgcgcgatgacgccatacctgtccagcaacgtctcgaccagtgcgagtgcccgttcggtctggtcggtgtcttcggcttcagcttgcccgattacggcggaccacaaacctcctaacgtcatatccgtagtggctcggcgaatcggagcgacacgcccacgacgacgtgatgtagtggatttacgcgggcttgctgcgcctgcggttaatgcacgcaccggcgcgaagctggaattggtgaccttaccttgccagaccaagctccacaaggcatccttgaactgctgttcgctccactcttgcggaatgatttcgccggtgtttggattgatgtccggctccgcggtctcattccacgcacgtttggcggcatccatcagttgacgggcatggaacgctccccctgagtccagtgcggtcagaatcgcttccggcatggtggcgtctgaggcgttcgatgtcgtaccatgttccacaccgctgaacaatattgaatccgccggatagaaagcaacctcaccagggtccatcgcactggttcccccggtttttgagccgacccagaccacatcgccgctggtcagcaactcatccagcaatgcaggttggtagtctcgtactcgtgcggggaatactgccgactcccagagtgcagtgggcagtgatatgccctccagctgctcgataacgcgcatgagcccgtcagcaccttcatatcgttcgccgccgaccggcccgataccttgtcggtcgataagaaacatctggaacgcctctgattctactggcttgactgctttacgcgccttggccaatgagcgagaccgaatacggcggaatacgtccttatggagccactgttggccttgctcgtcatcatctacaaagtggccttgcagcaactcgcctttggcagccagcacatccagagtgtgcacggcatccgtagcatcgaggtgtagatcggctatgagctgatcggcggtgaaaggaccatgggttttggcgtaacgggtcacgcgaccagtcacatcatcgtcggcaagctcattccagaaagtgtgctcccccagttcctgttcgacttcgcgaatcacgtccgggttgagcacttgtgccatatcggtggtgccgagcaagcgttcgagcacgtgcggatcgagagacagcagttgcgcgctacgctcggcctgaggttggtcatactggtacatcaccacgccgacgaagccaaagagaatgttctcggcgaaaggcgatggcgactcggtttccacgtccttcacggtaatggtgccggcttgcaatccggtcatcacctcgttcagggcgggcatgtcatacacgtcctgcaaacattcacgtgcagtctccaacagaagcggaaagttcttggccacgcgagccgattgcaggagctgtgcggctcgcaatcgctgctgccataggggtacgcgacgacccgggtcggatcgcggcatgaacagtgatcgggcggcgcattcgcggaatcgtgcggcaaatagcacggactcgcccacctgacgttctacatccgtttgaagatcctcggaatcgaaaaggaacagatcctgagcgggaatatgcccgtcgccatccggcagctgaatgacgataccgtcatcagcggcatatacctgcccgtcaaaaccataacgctggcgcagcctgcgactgatggccatggaccacggttcatgaacacggcggccgaatggactcagcagtacgatgcgccaaccgccgtcttcatctcgcgtgcgctccacaacgagggtttggtcgctgggaaccgtaccagtggcggcttgttgctcggagagcaggcgggccaagttggtgatggcgttggcatctaggccgtcgtggtggagacgggtgaggattgttgggatgaaggttggaacggctgacccctctacggcagacctcccctcagtccgcctcatgtctagcccggcagcgatttctcgggtgaaacgggctatggtacggctgaaaccgtagtcgcggccggaaccttcgccgtgccagaacggcagacgggcggtgcggcccggagccggcgtcaccaccacacggtcgcgggtgatgtcctgaatctgccatgtggaggtacccagtgtaatgacatcgcccacacgcgactcatagaccatctcctcatccaactcgccgacgcgacgctggcctttgccggcgtccgcctcaggcaggaccacggtgtacagccctcgatcgggaatcgtaccgccagaggtaacggccactttctgcgaaccgggacgggcggaaatcaggccattatcccgattccataccagtcgcggccgaaaggccgagaattcctcgctgttgtattcgccggacatcatgccgattaccgcatcgaacatgtcacgtggcagttcggcaaacggcgcagcacggcgcaccgtggcataccagtcatcagcgttcaaatcgtgcatcgcggcagcggccacggtctgctgggcaagaatatcgagcggattgcgcggcacggccaatggttctatatcgccggcaatcatggcttccagacttgcggccccagtgacaatctgctgacgggtgagcggatagaacaatgcgtgagagacgccaccgacctgatgatcggcacggcctacacgctgcaatccggaggagaccgacaacggcgtatcgacttgaatcaccaagtcgaccgagcccatatcaatgccgagctccaaactggaggtggccaccacgcagcgcaattcaccacgtttaagccgttcctcaatcattttgcgacgatctttggaaaccgacccatgatgagccatggcgatgacatcatcgccctcatgtgagccgacaagcatggtggtggagccgaccacagcatcgtaatgcgtggagaacccttcgcggccttccggagagcccggatcccgcacagtgtcgggattggtgccatgccgggtctgcgcatacagatcgttcaagcgcgcggtaagcttttcggccacaccacgcgaattaacgaacaccaatgtagtgcggtgcgcgagaatctcatccaaaatactgcgttccaccacgggccaaatggaaccggaggtacggtcgcccgccgctccaaccaacgcggaggaatcgaactcatcactcgcatcagaatcgtccccagaagtggaagaaacatctctatcatccaccggcacaatgcccctgcgttcagcaagtcgctgcatggccggcgtgacaccactgatatgcggagcggaccgttcagcatccacgccaccgacacgctgcttggcattcacggactgcaaatcacgcatgttttccaacggctcaatcatgcgcaaatccattgcaggccgcccaccgggattcacgatggtaaccggttgcccgccgcccaggaatcgcgccgccttttcaggcggattcaccgtagcggatagaccaacgcgctgcatatgacgatcgccgcggccagcatcaacggcggcatcaccgccctcatcagcatctgcatcgattgcatctcgcttgcgcgattctgcgacaaggttctccagccgttccagacttaccgccaaatgtgcgccgcgcttggtgcccgccactgcatgaatctcatcgacgatcaccgtatcgacagtgccgagaatccgccctgccttcgaagtgagcaacaaatacaacgattctggcgtggtaacgaggatatccggtggatgggaggctatgcgccgccgctcctgtgcggtggtgtcgcctgaacgagtggcgaccgcgatcttcggcacgggcagcccttgcgcctcgcattgtgcagcaatgccctccaaaggctgttctaggttcttggccacatcggccgcgagcgcctttaacggcgagatatacagcacacgcacaccggcacgccgcgtgcgtggcacggtcatcaatcggtcgatggctgagagaaacgcagccaatgttttgccggaaccggtaggggcgatgaccaagacattgcgaccggaatggattgccggccatgcctgagcctgtgcctcggtcggctgaccgaaggcatgctcgaaccacatcttggtgggttcggaaaacaggctcaggctttcgtacatatgtacgattataggtcagctgaagtaggcgatgacttcttcggcggtaccgtaggcactttgggcaccaagcttggtggccgcataggcggagacgtaggagccgatttgcgcggattgcagcagcgtatgaccggcggccaagccagccagcacggtccccatgaacgagtcgccgcaaccggtggtgtccactgcattgacttgcgcggcggatacgcgatgccaacgtccgttctcgatcaccaccgatcccgacgcaccaagcgtcactatcgcccggtcgaatccgtaatcggtgaatcgttcggcgacctcataccagtcgagtgattccacgtcatcatccggcaggcccagcagttgagccacttcatgctggttgaccagcagaatatccgtggcttccaccagttcgtgaggcagctcgtccataaatggcgagtcgttgagcagcacggtcacgccagcgtcatgcgcggtctgcgcggcggcgataacggtggcaatcgggctctccaaacacagtcccaataccgcgcattcggcgatggtcgtgcgatgtgattgcacatagccggcacttgccttggcattggaacccggcgaatagacgatggtgttctcgccctcagcgctcacggtgattaccgtggtgccgctggggccttcgacatgcaggatatcggcggtgtcgacgccggcctcatccagcttgcttaataggaagtccgcgttggagtcctcgcccaccgcgcccagcaactggacattgacaccgagacgagcggcggcagacgcctgattcgcgcccttgccgcccggcagcactttcatggcaccaccattgacggtttcacctggcttgggtagtcgtttagtggttacggtgtaatcggcgttcatcgagccgaccacgattaccgagcccggcgcatccttcagcgctctcaatcgctcccgtacgggctcgggcatctgttcatgttcttctccacttatcaccatgggctccaagcatagtaggcgacgggcccaaatgcgcatatgatcagccgcgcaacttgcgaagacgctcgtgcatggccaccatcagcaccaagagcaccagcaaataccacgggtagagactgattgtcacatattgcgcgatgatgccgaacagtggcggcatgagcagtgagcccacataggcgcaggccatctgcacgccgacgatggcctgcgatttgtcttcgccgaagtaggccggcgtcgagtggatgacgcacggataaatcggcgcgcacccgaagccgatgaccaccagcccaacgaccacgccaaggtggtgaggcaatggcacgaacatggtgaggatgccggcgaacaccagcacttggccgaggcgaatcatgaccgggtccttgaatcgcatggtcagaaagccggaaagcgcacgacccacggtgatgcctacgtagaataggctggcccagctggcggcggtgatcttgtcgatgccgctgtgcatcaccatatagctggaggcccacagacccgccgtggattcgacggcgcagtagcagaagaacatcacgaggatttccttggcaccgcgaatggcgagcacgccggccacgccgagcggtttgcgttcagcaacagacaccccttcagcagtgccaaatctctcggcattgccgtcagatgatgcggtgtcatcggtcgattcgccgaccgcaattgcgccacgtttcttccacagtggcaggctcagcaccaggatgacggtcagcatcacctgcaggatcgcgatgtaccgatagccccacggccaaccttggccttgagagagcgcatagcccatgatgtaggggccgaccgatgcgccgacgccccacatgcagtgcagccagctcatatgccggctttcgtagtgaatggctacgtagttattgagcgccgcatccactccgcccgcgccaaggccgtatggtatggcgatggccaacagcacccagtaattcggggcaacggagaaaccggccaaggccgccgcagtcaacgccaccgaaacggcggtgaccttgcctgccccgaatttcaatgtcattcggtccgaaagcagtgccgagacgatcgtgaacatggaaatcaccgcggagatgccgccggcccacgccaccggcacgttcagatcctggctcatggtgggccatgcggatccgagtagcgaatccggcaatcccagactgataaacgccacatagatgacggcaagcaacagactggccatgtcccatctcccattcacagtacggcaccggttgtgataacgatgtcatcagtctatcgaatgactcatgggcaacacgcataaaacatatgacaacgtgctcacctcaaacgccaattacggaaattctcggtaagcacgatgtcattatcagcgacgtcttcgatcaggtatcgatcttggagcggtcgaaatcgtcggcgttgtcgacgatgaactgcttgcgcggcggcacgtcgtcgcccatcagcaggctgaagatctcggatgcctgggcggcgtcctccatgcggatgcggcgcagcatacgcgtgcgcgggtccatggtggtgtccgccagctggtcggcatccatctcgcccagacccttgtatcgctggatgtcgtcgttgtaaccgatgtgcttcttgtcgaggtcggccagtttgccggccagctcgtcatcggaatacgtgtagatgtattcgcccttgtgcgagccggtcaacgcgatgcggtgcagcggcggtactgcggcatacacgtagccgtgttcgataagcggccgcatgtaccggtagaacagcgtcagcaacaggatacggatgtgcgcgccgtccacatcggcatcggtcatcatgatgatcttgtggtagcgcgactgttcgatgtcaaagctctggccggagccggcacccaccacctggatgatggccgcgcattccttgttggagagcatctgcgtaatcgacgccttctgcacgttcagaatcttgcctcgaatcggcagcagcgcttggaaaccggcgttgcgggcggccttggcggtaccgagtgcggaatcaccctcgacgatgaacagttcggccacgtcgtcattgcccggctggcagtcggagagtttggccggcatcgaggcggattcgagcgcgttcttgcggcgcgtgacctccttggccttgcgcgactggatgcgtgcgtgcatttcgccgacgatcttctccagcacgcggccggattgttccttgtacccgcgcttggagccggtgatcatctcgccgaattgcttgtcggtgagccgggtgacgatcggcttgacctgcgcggtgccaagcacatccttggtctggccttggaactgaggttcggccacgcgtgcggtgaccacggccacgagtccggcttggatatcgtcgcgctccaccttcatggcggagtccttcatgttcaccttgagcttgcgggcgttgtcttccaccgccttgcgaatctgcttggtgatggcgttcatgaaaccgtccacgtgagtaccgccgccgggcgtctccacgatgttcacgaagctcatgattgtggtgtcatagccgttgacccatcgcagggcgatatccacgccgcaggtgcgttcgatttcctgggcgtgcagttcaccgcccttgcccacggcctgggtctcctccttataggtgccctcgccttggatgcgccagatgtcggagatcggctcgcctttggacaggaagtcgacgaagtccttgacgccgcctgtgtgcaggaattccacgacgcgcgggtgcgcgggctgttcgccgaacgcgccatcaacgacctggtcgccggccgtcagcgagaagtcctcctcggccgggctctcggcatcgtcggacgagacatccaaggccggtgcctgatcttgcgcaggttcgactgttgcgtcatcagtggcctcgacggtgtcagtcgccgccgtttccggtacgttttcgtcgatgatggtgattttgaggccgggcaccaagaagctggtctgacgcacgcggtcgatgagctgttcgtatgagaactcggcggttttgttgaagatctccggatcataccagtagcgaatacgggtaccagtggttttgggagataccttgccgatgatttccagctcggtgggtcggttcttgcgagtgcgcttgaacggggaatcgggagacggattggccgggtcggcatccgtgtatacgccagggtgaccttggtggaaggtcatgtggtgcgtcttgccgtcacgatccacttcgacgtccagtcgggagctcagggcattgaccacggaggagcccacgccgtgcaggccaccgacggcgttataagacgaattgccgaacttggcaccggcgtgcagtttggtcagtacgacctccacgccggacaggccggttttcggttccttgtccaccgggatgcctcggccattgtccgcgacttccacggaaccatcggtgtgcagggtgaccacaatgtcgttgcagaagccggccaaggcctcgtccacggagttgtcgatgatctcccacaggcagtgcataagcccctgcgagtcggtggtgccgatgtacatgcccggacgcttgcgtaccgcatccaagccctcaagaacagctaggtccttggcgccgtattcttctttgggcatacagtcctatttttctcttcaaatgcttggctcccctcacagaggggagccagatgatcattgatccaggaagtcgcgcagggtctgcgaacgggatgggtggcgcagcttggacatggtcttggactcgatctgacggatgcgttcacgggtcacgccatacacacggccgatgtcgtccagcgtcttcggctgaccgtcttccaggccatagcgcatcttgatgacgccggcctcacgcggagacagggtttccagcacctgcttgaactgttcctgcaacagggagaaggccacggcgtcggacggagcgatggcgtcggtatcctcaatgaggtcaccgaactcggaatcgccatcctcgccaagcggggtgtgcagggaaatcggctcgcggccgtacttctgcacttcctgcaccttctcaaccggcatatccagctcgcgggccagctcgtccggcgtaggttcacgccccagatcctgcagcatctggcgctgtacacgggacagcttgttaatcacttcaaccatgtgcacaggcacgcgaatggtgcgggcctgatcggccatggcacgggtgatggcctgacgaatccaccacgtggcgtaggtggagaacttgaagcccttcttccagtcgaacttctcgacggcacgaatcagaccaaggttgccttcctggatcaaatcaaggaagagcatgccgcgacccgtgtagcgcttggcgagcgagaccacaagtcgcaggttggcttccagcagatggtccttagccttcttgccgtcggcggcggcccacttgagttcacgcttgcgcttgaactccatgccttcgctttcggtgtcgagcaggtgctgggcgtacaggccggcctcgatgcgctcggacaggtcgacttcctgctcggcgttcagcaggctcacgcggccgatctgcttcaggtagtccttgaccgggtcggcggttgcgccggccgcaatcacacgacgcttcggattgcccgaggggatgatgttctcttcctcatcatccgtgtcggagaccacgtaggcacccttttccttgggctgctcgggtgccttggacttggcttcttcctcgtcctcgtcgtcttccacatcatcgtcgtcggcatcgtcctcatcgaggtcttcgtcgtcggcatcgtcttcgtcaacgtcgtcaagatcctcgtcgaggtcgtcaacgtccaaatcgtcgtcgttgacctcggcatcggcatcaagctcgtcatcgacctgagtgtcctcgtctttgacgagctcatcgtccttggccttcttcgcggttttcttcgcggcagacttgcgcgtggtctttttcgagggctctgcggacttggacttcttggcggaagtcttgcgtgcggtggtcgtagagctggccttcttcttggtctcggtctcctcgctggactcggctgtctgcttggttgccgtcgtttccttcgtggccaaaactgctcctcctgatctctcgccatgaagtgcatataccacatgggcccacttctggcaagggcaaatcgtcaactatgtgagtaaaccaccctccacggacgattattcccacatcgttgcccgacgtgttgccgatcaccacacgctttccttccgcgcatcgcgcgtaaaacctcggaaatccgccgtttctgttcactcagcccgagcaccatgccggtgccacgcctcgatcggcggctgagaatatcatcgccgccagcgaacaatcctcatcgagcagcaggcatcgcaaggcgaacaccattgctcgcggatcgcccagccaccataaggtgtaggcgattacggccaatggctgtatgcagtacggcaccggtgaggcttcggcgatatcgagcaacataccgatgccggtatggcaacgctccttatccggcatcatgccttcatcctcgaatgcgcaggtcagcagctcgcccattcgtgttctcgtacgtgccagatgcggtcgcgccgcgaattccatgagccatgacttggggcaacggctttcatcaataaccaacgagagaatcagcgcatcacgaatcgataaggtctcgcgcatgcccaccgcaaacgcggccatcgtctctcggcctaggtcggtgttcccggcatcgagacaagacagccattcgtccaatggttcggccacccagtcggcattagcctgttgcgcgcctcgaagtcggcgatcattgcgaaattcctgtgatctcgtctccaactcgtcaaagacaaagggctccgtctgctcggcggcgtgccgtttggcgtgtcggttcttacgcggcttgtgtggcgtgttgttgttcatcatgtcctccttgactaatggtgtgcaatctattggtgttgtggtgcgcgctgagccaggtagttcacgcaccgagtggggtgtgcccactatggctgaaaacgccgtatgacgcaggaaaaaacgaccattgtggttctagcttcaaaacccttgatttccaacgttcttgtgttcttcaaaccctgtggataagttattaggcatgtgcacaactgctaacaaccgcgaaatcatcgagccacgcatcattcagttggtgcgggaactgactgccgcccccgccaccgacgaggttgccgacgccctgaaaccggtgatggaacaggttgtggaccaagccgcctcctccagccaaggaggcaaacgactgcgtgcgctgctcgcattggacgccttcgatgttcttgccggcgacgtgactcctgattggcgtgacgccatgatcgacctagcctgcgccattgaagtgtttcagacggccgcactggtgcatgacgacatcatcgacgaatccgatctgcgccggggcaagccttccgcacatcatgccttggaacaggccgtacacagcggtgccataggccgtggcttgggcctgatgctcggcgacattctggccactgcctgcattgaaatcacacgccgatccgccagccgtcttcccaacaccgatgccctgaacgaggcgtttcttaccatgcagcgcgaggtggaaatcggccaggtactggacttggccgtcgagatgaccccgctgtctaatcccgaagctctggcgaacgcctcattgaacgtattccgctggaagacagccagctacaccaccatcgctccactgctgcttgcactgctggccgcaggagagagcccggatcaggccagacattgcgcgttggccgtcggccggccgctcggactggcgttccaactggcggatgacctgttggatgtcgtcggatcaagccgcaataccggaaaaccaattggcggagacatccgagaaggcaaacgcacagtgctgttggctgatgctctgtctgcggcagatacggcggataaggccgatctgattgccatcttcgaagcggattgtcgcaatgacaaccaggtggcccgcaccattgaactgttcacgtcgaccggtgctcttgatcgatcccgcgagcgcatcgctgccctatggggtgagtcccgtaaggcgattgccggtcttgagctgaattccgaagcgcaacgccgtctgaccgaggcttgtgcgcgattcatccccgaatccttgcgatagtccgcaatgcgagccgccggaccatgagaccatgaacaccggtgaaaacccgtgaaaactatgcgctgatgctccggccgcgtaaccggggccatgtacactgaacatgtttagtcgtgattaaaggaaccgtacgatacaacatgagtgagaacgagcccgcgcagatgattgagggacgctaccgcatcgtgcgcaatatcgccgagggtggtatggccaccgtgtatgaggccgtcgatgagcgtctggggcgcaccgtggcgattaaggtcatgcacacacaactcgccaaaggcccgcatcgggagcagttcgtcgaacggttccgccgcgaggccaattcggccgcgtccatcgccaacccgcacatcgttcaggtgtatgacaccggcgagttcaatggacttgattttctggtcatggaatatgtgcatggcgtcaatctgcggcatgagatgaacgcccaaggcacattctccgtacgtgagacgctgcgcgtggtcgcggagacgctggatggtctggcttccgcacatcgcgccggcgtggtccaccgtgacatcaagcccgagaacattttgatcaatgatcgcggccatgtgcagatcactgatttcggtctggccaaggccgccagccaggccacattgagctccaccggcatgctattgggcaccgccgcttatctggctcccgaaatgatcgagaacaatcaggccaccgcgcaaggcgacctgtactcggtgggcatcatggcatgggagatgctgaccggcaaggtgccgttcgattcggataatccggtgacgcttgtcttcaagcatgttcatgaggacgtgccgtccgtggccacggtctgccagggcattgatccgtccgtggcggcgttcatcgcccatctgaccgcgcgtcaggtggatgcccgccccaccgatggcgcggcagcagctgaggaattgagccagttggccgccaaattgccgctggaggcgtggcaataccgtttgcatgccgaacccatcggaggcgatcataccgatgccaccgctgcagcgctggtaggcaatatcgccgagcaggccccgctgaccggcgtacctgccggtgcagcaacgttcaagccgtccgtaccggcatttttggccgatgatgccgcaagcaataccgtcgataccggtggcgccgcagacgtcaatcccccggcgcctccggtcgcccccaccacggcacttgattcgtcgacgccagccgatgcttcggctccccataagacgcaaatcatggcacagtccggcagcgagacacaagtgctgcctcaggccggcgatgccttcacccgagcgcttgccctttccgatgagccggacgtcgcttccaatagcaccgggccaaagaagcagcgcagcaaaaaaccgctcatcatcgtactggtgatcgtgctggtactggctgcaatcggcggaaccgccggctggtggtggtttgccggaccgggcagctattggagtgtgcccaagccggatgacgtgacctgcgatgcgaatgcaagcaccgaatgctcgctggccggcgcggattgggccacgtatgaaagcacgttgaaggctctcggcatcccctacaagacgcacaaggaatacagcgacgacgtggcggaaggcaagatcatctcttcttccgtgaacaagaccaaggccgttgtgaacagccacataagcaagcgagccaatcaggagcttacggtggtggtgtccaagggcgtgcggatgaccaccatcccgaaggatattctcgacgcgaattcggccaatggcaaagacccgttgaacgcgctcaagaaggccggcttcgataatgtcaagcacgacgagtcgaaggacgagtattcgatggacacgccgcagggtgtggcattgacgatctcccctgatcccggtaccacggccaagcacaacgatgaggtgacggttactttgagcaagggaccgatgccggtgaccatgcctaacatcgtcggtaagacccaggatgagatgcaagccgcgctcggcgagttgaagctcacggccaatgtcaccgaacagtacgatgacaaggtcgaggccggtcaagtcatttccgcgtctcaggaagccggagcccagctgaagtggggcgatagcgtggacgtggtgatttccaagggtccggagatggcgacgataccgtccggccttgtcggcaaacaggaaagcgccgtaaccaagacacttgaaggtctcgggttcgaggtgaaaaccgacaaggtgctcggtggcctgttcggcacggtacgtaccgtgaaaagcagcgatacggacctctccaacggcggcaagattcgcttgcgcgacgccaacggcaaccccaccgtcatcaccctcaccatcgtgtgagatttgaatgaggctccctctgtcttcagacgagggagcctcatttgctaattacttttcggcttcttcagcggcctgctgggccttgagctcggccttgaccttctgggcgtattcgttcacgaattcctgaccgctcattttctggattgcggtggaaacacgatcggtcagcgaacgcaaatcatcatgtgtaatttcatcagccggcttcttcgcaacctcaatcggcttgccatacaacaccttggtcttgcccttcttgggaatcgacgtgccaatcggctgcagcttgtccgagccgatgatggcggtcggaacaatcgggcaaccggtctcgagcgcaagtcgtgcggcaccggtgtgtcccttgtacagtcgaccgtctgggctgcgcgtgccttcaatgtggataccgaacaggtgcccatcctcgataatctcgcgtgcatgctcgagtgcgccaagcgacttgctgccaccggaacgatcaaccgggaacacgcccacggacgtgaaccaccacttcttgaacttgcccttcaatcccttgccctcgaagtattcggctttgcccatgaagtgcaccatgcgcgggcaggtaatcggaatcaaagcatcatcgatcaccgccagatggttggctgcgataatcgcgccaccctctcgaggcacgttattcagtccgctgacagcagggctcaaacgatgatgagcaatagggccgagacctttgacgaagaaccagtagagcacttggcattcctcccgcagacgaactagccattggccggtcgcctgattagagtgacagttatgactgagaaccagaatagcaatgccgacggagagcggccaacccccacgccgggcaacggacaggattccgatacttcgtccaagtcgtcgactcccggtgccgccggacaagccacgaatggtgccgatacaccgcaatcgcatgacatgaacgatttggatgcggcgtgggccgcgttcgaagccgagcatcaggccgacttgcatgacgtggcttcctccaggcaggccaaaaagttcgagaagcaggccaagaaacgcgagaaggaggcgctgctttccgtagatgacttggatatcggctcgttcaccgatgatgctcgcccgagccgtggcggcaaaaaaggcaagcagtcaggtccccgtgatttcaccggctccagctggctggataccgataatgtgatggacgcctatgatgatggcggcttcactcccccgaaccctgatcttggtccggtcaaagcgtctacggtactgctgacggcgttgcttatcattggtctcgtaggcgaagcggtgatgatattcgtccccggcttgaacgcgattcctctcttgggcgcgctgctcaatattctcttcgggctgggcgtcattttgggcttgggtggattggtggccaaaatcctcaaccgcaaagaccgccccggtgatcagggcggctattacgacgacggcgcgagggtgtagctcgcgtaggctgtgtggtccttggctcccctctctgaggctgagccgttaagcgaacagcccagcgggctgtttgtaggcgaggtgtgagagatagcgaaccaatgtattgcgggcgtggctcgtccgtaattgcggccgagccacgataggtcacgaattgaagtcgatggactcctgtaactcggcaatcatggccttgatgcgggcgtcgcctccccaccagttgagacggatcgtcacgtcccctttggccggcacaaccggcacatcagcggcaccaaccgaagtgccgcacgccgcagtcacgcacaaggccacggccgccataacagccgccatatagacacataagcccccctcatcagaggaggctgagtacggtgtatcacgccttggacttggcggtttcgatccacttgtcgaacagggcttcggccttgccggaatcgacggtttcctcggccagcttgtaggcttcggcgaaacgctcggccagtgtgccgttgccgaccagattgccgtcggccacgatggcggaggcggcgttgagcagtgcggtggtgcgggacggaatgtccttgccagccaggaagtccttgaatgcgttggcgttgacgtccggaacgccgcccttgagctgttcgacggtaatcttggccaagcccagatccacagtcggatcgaactcggactcggtaaccttgccgtcgcgaatctcccagacggaaaccgggccggtgggggcaagttcgtccatgccctcgtgggaggtgtagaccaagccagactgtccacggctggcgtacacggctgccataatcgggctcaccttgcggttggcgcagccgatggccacgtgtgccgggttggcggggttggtcaacggccccaggatgttgaagacgcacgggatgcccagcgcggcgcgaatcggccccacgaaacgcatggccgggtggaaagtgcgggcgaacgcgaaggtgatgcccacctcgtcgcccacttcgccgacggcttccggcttcagatccagcggcaggccaagggcttcgagcacatcggcggcaccgcacttcgaagatgcagcgcggttgccgtgcttgacgatcttcacgccggctgcggcggcggccacggagcccatggtggacaggttcacggtggcgaagccgtcaccaccggtgcccacgatgtcggtggtcccaccggaaacgttcagcggcacggcgtgggagaccatggccttggcggcaccacgcacctcgtcggcggtcagccccagctgctcctgcatggcgagcgcggcacccactgcggcggggttcgcgttgccctgcatcaggtcgtccacgaaccactccgattcctcagcagtaaggtggtctcccccgaccagcttggtgagaatcgacttccatgtgatctcggccatgatgccctccttggcgtttcctacgccgtgtgatatatgttcgccgctcattgtaatggtttgtcgtttcaaggccctgaatcttccatatcgcaaaatatgagtcagctcccgccagcgggagccaacctattttttcgccaatcagccgtctgcaaccggctggtcagcagtatcagtcgctaatcagatccaccgtatcactcggcggtctgcggccagcacttctcgtacttgatgccggtgagctgctcgacgatcttcttggtctccggctcaacgtcagccttcttgccgccggccttgaacgcctcttcgacgaaaccgttggcaccgaggtaccagccccaagccatggcggacaagccagcggtgatctgcgggcgaactgctggaagccgatgtacaggccaccgcggttttcgccagccatgatcatgtcgacgtccgggatgaacgggaacacgttccacggaatgaaccaggtcatagcacggaagatcagccaccagaccatgaccacgtacagcatggcgttccacacggcggtgttgttctgggcagcagtctgccacaggccccacagaccaagcagaccgatgatggcgccggcaaagttcagggagaacatcttgcgcgggccaagctcggcgaaaatccagccgaacacgggcttgagcggttcggcttcaagggcagcctcgtagaaaccggcctcttcaggagtcagttcccacgtggacttgtacgcgatgaacacgaacacggcgaacagcacgatgaagaagcccatggaaatcgtgtaggacgagctcttcttgtcaccgagagcattgaggaatgcagccatgcccaacggaatcacggcggtggaaataccggagaacagcattcgggtggtggacagcatggtgcggccgttgaagtcggtggtcatctcgttcgggagcgccgaatacggggtcataatcagctggttggcgataatccacagtgcgtacaccaggaagtacgcccacaccggcatgcccggcacgaacataaggatggtgaccagcaacgtaggcacacccagcagaatcaggaaacggcggcggccggctatgtggaggatctgacccgccgcggtaccatcgacccgtatttcgaccagcctatctacgacgtgtatgccaagtccgccgcccgcgtgaaccgcgattgggacaacctgccgttctacagccagctcgacgccgaattcacacgcctcatcattcccacactgcgccccggcggccacagcgccgacctcctacccgaatgggaggcacgcctcaagcgctacgccgcatcccaaggcttcacagtgaattaggtcggcggcggtattccgtttccggtacatcgcatgccgtcccgcgcgtacggcaccgcacgaatacatgccgatgaaccgcacaaaaaatggctccccatgtggggagccatgagctagttactaactagcgatgcgtcacttctcgttctgaccgtggcacatcttgtacttgcggccggaaccgcacgggcacggggcgttcttgccagtgccagggaaggtgcggccgtcggcccacggcgtcttgagctcttcgctcttcggacgcttggaaaccgggaccttgccttcggcgtggctgatcggagccgggccggcaacaggcagcgtggactcgccggccccggaggcggctgcggattcggcgatcgcctgcttggcgtccgtatcctcgtcctcttcctcgacttcgccctcggcggcctcgaccacggattcgccgttctcgtcggggccggaggccacggcgatggtgtcggcgctttcggcggtctcctcgacctcgtcaacggcctcgtcggtggtggcgacctgcttgatgtcgatgtggaacagcagctggacggtctcctccttaatggcctcgatcatggagttgtacatctggtagccttcgcgctggtattcgaccagcgggtcgcgctggcccatgccacgcaggccgatgccgtccttgaggtaatccatctcgtaaaggtgctcgcgccacttgcggtcgagcacggcgagcaccacgcggcgttcgagatcacgcaagccggtctcgccgatggtctcctccatttcgccgtactgctgcctggcgtcctcgacgatcaggtcgcgcacggcctcgacggccttcgcacccttgaggccgccgacgatcttcctgacctcgtcttcgtcgaccttggtggggatcacggtgttgagcgccttgaacaggccctcccaatcccagtccttcggtttctcggatcccttgttggcacccttgatgtaggactcgacggtgtcggaaatgaaacgcaggatgtccttgtggatgtcttcgcccttgagcacggcctgacgctcggagtagatgacggtacgctgcttgttcatcacgtcgtcgtacttcagcacgttcttacgaatctcgtagttgcgggattcgacggccttctgtgcggtgcgcacgcccttggtcacggacttggcctcgatcggctggccttcctccatgcccttggccatgacctgggccaccagctgggtgttgaacagacgcatcagatcgtcttccagcgacaggtagaagcgggactcgcctggatcgccctgacggccggaacgaccgcgcagctggttgtcgattcgacgggactcgtggcgctcggtgccgagcacgtacaggccgcccagctccttgacctcctcatgctcgtccttgacctgggccttgatctcgttcagggtgcccggccaacgcttctcatactcttccggggtgtcctccggagagtagccctcggacttcagcttggcgtcggcaaggaactcgacgttaccgccgagcatgatgtcggtaccacggccggccatgttggtggccacggtgacggctcccttgcggccggcgacggcgaccacggcggcttccttctcatgctgcttggcgttcaggacctggtgagggatcttggccacgtcgagcagggtggagaccacttcggagctttccacggaagcggtaccgagcagcaccggctggcccttggcgtgacgcttggccacgtccttgacgatggcggccagcttctccttcttggtgcggtagatgaggtcgtcctggtccttgcggatcatcggcttgttggtcttgatcggcagcacgcccagcttgtaggtgttcatgaactcggcggcctcggtttcggccgtaccggtcatgcccgcgagcttgtcgtacatacggaagtagttctgcagggtgatggtggcgaaggtctggttctcggccttgacctccacgccttccttggcctcgatggcctggtgcagaccctcgttgtagcggcggcccggcaggatacggccggtgtgctcgtcgacgatgagcacctcgccctgggtgacgacgtagtccttgtcacgcaggaacagttccttggccttgatggcgttgttgaggtagccgatcagggcggtgttggccggctcatacaggttgtcgatgccgaggaagtcctcgaccttggtgatgcccgggtccaggatgccgacgaccttcttcttctcgtcgacgtcgtagtcctcgtcgcgggtgagcttcagcaccagcttggcgaactgacggtaccagcgggccacgtcgccttcggccgggccggagatgataagcggggtacgggcctcatcgatgaggatggaatcgacctcatcgacgatggcgtagtggtgaccgcgctgcacgaggtcggccttctcccatgccatgttgtcacgcaggtagtcgaagccgaactcgttgttggtgccgtaggtgatgtcagcgttgtactgcttgcggcgctccggcggcttctgctcggtgatgatgcagccgacgttcatgccgaggaaacggtagatacggcccatcagctcgctctggtagctggcgaggtagtcgttgacggtgaccacgtgcacgcccttgccttcgagagcgttcagataggtgggcagggtggcgaccagggtcttgccttcaccggtcttcatttcggcgatgttgccccagtgcagggcagcaccgcccatgagctgcacgtcgaagtgacgctggccaagggtgcgcttggagacctcgcgcacggtggcgaacgcctcgggcatgatctcgtccaggctcttgccgttttcgatttcctgcttgaacttcggggtttgggccttcagatcctcgtcagagagggcggagatctcgtcctcaagagcgttcacggccttggccacgttctccagcttcttgagctggtggccttcacccattcgcagggctttgtcaacaatatcgaccactgggttctcccttgactgataagtggtggtgtccgcgtaccagaatagcgcctcgcaccgtcagcagtcgaatttttcgaccttcttacgaaaaaatggaccgcctccatattggaagcggtccatgcggtatcagctgatcgtgtcagcagcccttaccctcaggctttcttgacattctccggagtatcgatttcgaacacgccgtagctccaaccgtgacggtggtagacgacggacgggcgtccggtctccttgttcacgaacaggaagaagtcgtgtccgatcagttccatctcgtacagcgcctcgtcgatgctcataggctcggcgatgtgcagcttgcgacggatgacaatcggcgtatccccaacctggacctccacggattcgccagggccaagatcggaggcgaccgcagcctgcgggctgttgttcggctcttcctccgacacctccggctcgggctccggggcgataacacccagatccaccgggaccgggttcgcgtaaccacgacggtgatccttgcgacggtcacgagtacgacgcagacgcagcgtcaacttatccagcgccatgtccagcgcactgaattcatcggtgctggaagcctccgcacgcaccacggtacgtccggcgataacggtgatttccacgcgcttggcggtatcggcctgacgcgggttgccctcatgggtcagcacgatctgcgcgcgctgagcatccggggcgatagcggtcacacgattcatcttggtctcgaccacatcacggaacctttgcttgacctgcgtgtggcgtccggtaacgacgatttccatgttgacctcctctaactcaagcggtgtaacccgctatatgtgttccgaacggcatcatcaccgaccgggtatgtttcattgtagacgaacaatgggtgaacggccggaaactcgcccagagaatatatgtttattcccgggcttttctctgcaatgaaacgatgtatatactggggttttggcagcagtctcctataagaagatttgataccggtttatcaggctggctcgtttgttcgtcatggtaaatactgcaatggataggcagcgttttcttgctctttctcgcacataccaagctcttacagatttgattcgtctccatacgacacgccacaacacgcccgacacgccccatccgatattcggcgcgtcgttcacgaatcgcccaactatgcccaactatggagaaaacaggataaccgggcaacgtcatggcctcaccgcagggcgggatgccgccttttccgcaccttatgtataattgcaggcttgagacctcttgatggccgcggccgtgatcttcattgggatcggctgaggaacttccgggctccatagagcacgatggcggataacgtccgcccagggtgacctgagagatagcgcaacagagaacagaccgcccgtcctcgacgggtaagggtgaaacggcggtgtaagagaccaccgggcctctggtaacagtaggtcgcatggcaagcctcatcgggagcaaggccaagcagatggcggtaagggctgctcgcccgtgtcatcgggtaggctgctagagcctggcggcaacgtcaggtcgagatggatggccatccgtgccgtgcgttcgcgcacggcacgacagaacccggggtataagaggtctcattttttttcttggctacaccaacaattcggcggcgactcggcggagggtttcggggctgtgtcctttgcggccgcctgcggaccaaaaccgacgctgacggacctgacgatcgaggccatgggttttgcgggctatttggcggcccaattcccatgcggcatcttcaaagatgccattttgctcagcttcgccacacacctgttcagccagtttgcggtccacgcctttgcgagcaagttccaggaccgcaccacgacgacccatcatgcgaccggcacaatagcgtacggccgattcggcataagcgcggtcgtcaatcagttgcacgcgaatcagccgttcgatgacctcgtccacaatcgcctcgccatagcctttgctgagcaatcgttcgcgcaacgcgccggatgcacgtggggccgcgtccagcaaacgcaatgcagcctcgcggcaagcgtccaaatcattgggatcttcgacaacggcagcgtctctcccccgtcgagaaaaacgtcccggcggtttcgactgaacacgctgctcggcaatgggcatgtcttgcgacgcaacaggattgcgccgcaagaatgcttcggcactaatcatgttcaggccttagctgcgccggccttggcacgggtcgttttggcagcaggcgccgctgcggccttgctgtccttggccacgtcggcagcggcggcctcgctgacagcggccgctgctgcggcttcgccatcttccgcgaactggtcggcggaaccgatcagaccgaactcggccttgaccttattctcaatctcctcggtgatggccgggttgtccttaaggaactgacgaaccttctcgcgtccctgaccgagctgatcaccctcataggtgaaccacgaaccggacttcttgaccacgccaacctgctgggccatgtcgatcaccgagccctcacgggaaatgccttcaccgtagagcatgtcgaattcggcggacttgaaaggcggggccatcttgttcttgaccaccttgacgcgcgtgcggttgcccaccgcttcgtcgccgttcttcaaggtctggatgcggcggatgtcgagacgcacggaggcgtagaacttcagagctttaccaccggtggtggtttcagggttgccgaagaacacgccgatcttctcacgcagctggttgatgaagatggcggtggtgccggcctgagccaacgcgccggtcatcttgcgcagcgcctgactcatgagtcgggcctgcaaaccaacatggctgtctcccatttcgccttcgatttcggccttcggcaccaaagcggcgaccgagtcgatgacgatgacgtcaagcgcaccggagcgaatcagcatgtcagcgatttcgagggcctgctcgccgttatccggctgggagacgatgagtgagtcggtgtccacgccgagcttgcgggcgtaggccgggtcgagcgcgtgttcggcatcgatgtaggccgccacaccgcccttcttctgggcattggccaccacatgcaatgcgagcgtggtcttaccggatgattcggggccgtagatctccacgatgcggcccttgggtaggccgccgatgccgagcgccatatcgagagccaacgaaccggtgggaatcacctcgacgttctgctcgggctggtcgcccagtcgcattgcggaacctttgccaaaactcttctcgacctgcgccagcgcggtgtccagcgccgccttgcgcttgggatcgagctcgtgcttgtcctcagctgccgggtccttggccggcttggtctcaagtgccatgatcttctccttgtcgaagtcgtgtgcgaatcggatgcctccaccgtatgacggacatgccatgtgaggcaatccaaaccaaccattgtggttccagcttgcccgagcttggccacctggcctccttaagccctactgcggtaaggattatggcagatggcaagcaccctgtgcacacgtatgcggcttcttgtcactgtggataactataaccacacacacgaacatttgttcgaatttggcgtgcaacacgccgaaatcgccaatttcacgattcagcgactccgtaatcccgcagtgtcagacggcgggcatgggcggagcgttatgatcgtggccccaacgcttggagtccggaacctccatttggtcgcagagcacattccagaccacgcgtggctcctcccccgcgtccagcgcctcgaccacggtcatattcgccagtttgggcatccgttgatcacgcgacagcgaacgaccgtaggtccgaccgaacacctcttcaagtaattcccagaattcccgttcacgcatacacgccagtgtgccaccaaccgcaggacagcaaaaacccgcatcgccacaagcgatacgggttcacagctagacatagattacgggacgcggcttcacaccgccaaccgatcagccctcgaccgagtcgagataatcagccaccatgcgcagcatgcgcgaagtggagactccgagcgcatcggcgatggagctcagcagttcggagctggcttccttctgtccacgttcgacttcggaaaggtagcctagcgaaacgcctgccttctcggagacttcacgcaacgtgcggcgatcgcgcgtgcgcagctcgcgcagcacatgaccgatagcaccacgcagcgaaaactcgcgaggctcctcctcagccaccacgggctcggcggcggcagtcggcttgtacgacggcgaatcctcatcccacatacgttcacgaacggcttgacgctgatccttggccttcttggcggcctgtgccttgagcacctgctgctgggcgaacatcaccgcacggcgctgggccggagtcagttcacgcatacgggcgacacccggctgcacagccatcggcttcttggcggccacatccatctgttcgttcactcgggtcatcgtttccatcgccatcgccccttcccaggtcggttcagtgtttccactatgtacaacacgacaacccaacggttttattccttaaaacttgctgtgaatagactcaagttttgcagaacgtggaatacggtgaggcgacgaacctcttcgcgcatgccatcaagatggagttcgacggctttgagcacttcggcatggtccgcggtgaggcttgcggggatgcgcaggcccacatacaccagtccggccggcttgtcaccgtccggaccggggccggccacaccggtggtggaaaggccgatgattcggtcgccgtattccggctggctgtataggcgagcggtaccgatggccatctgccgggcgacttcggggtgtacggcaccttctcgatccaatagggccttgtccacgtgcaggatcgaggccttggcattgatgtcgtaggtgacagcggagcccaacaacacgttggaggcgccgggaatacgcacgaacgcatcggcaagcaggccaccggtcagggattcagcgcaggcgattttcgtattgttcgcctcgcaaatcttgaggatgccggccgcgagactgtcgcacaattcccgcattggaatatccgtcacttccgcttcggggcgacgaacgtgttgtacaggtacacggcacccgagtagaggcacaagaccaatgccacgtagatgatggcgtaggtcaggaagtagtaagcggtcatccagaacggcgtggcttgtccgttaccctgagaccagaacggcagcagcagcatggacagacccacgcactggaatacggtcttgagcttgccgggccatgcggcggcgatgactttgccgcccggacgctccatgacgaagaaacgcataacggtgataccaatttcgcgaatcaggaacaggatggttacccaccagccgagctcgccgaacgcggagcatacaatcattgcgccgcaagtgagcagcttatccgcgatcggatccatgagcttgcccatttcggtgacctgattgtatttgcgggccatccaaccgtcgattttatcggtggacgcggcgatgatgaacagcaccgcggcgacccagcgcatggtcaggttgttctcaccccaggcaccggcgagaatgtcgagtgtcaggaaaatcaccacgagtacgatgcgcgagtaggtgactaggttcggcggcgcgttccatccgtcggacagcgatgatttgggcgatgactgcttgtccattgtgttctcatccatagtgttcacgttacccccacacttctaccttgagtgagtattggctggatattgactgctattattcgggaatcaggttgcgtgctgatggccgcgtggccgcgcttctctctccgccccttcggggcacctccctcatcagaggaaggtcgatgggcgaattattcgccgagttcgggctgttgcggggcggtggcttcgagcgagctggtttcgcctcggatgaaggcgagcacctgcggcaggtcctgcggctggacgagcacttcgcgggccttcgagccttcggacggcccgaccacgccacgcgattcgagcaggtccatgagtcggccggccttggcgaagccgaccctgagcttgcgctgcagcatcgaggtggagccgaattggctggtgaccacgagttcggcggcctgcagcagcacgtccatgtcgtcgccgatctcctcgtcgggctccatgctgtctttcttttcggcttccttggccatctgttcgatgtcttcgcggtatttcggcttgcgctgggtgcgcacgaactccacggccttgcgaatctcggattcggacacccacgagccctgcacacgaatcggcttggcggaacccatcggcaggaacaacgcatcgccctgaccaatcagggtctcggcaccgaccgtgtcaagaatgactcgcgaatcggtggcggatgaggtggcgaacgccagtcgggatggaatgttggccttgatcagaccggtgaccacgtccacggacggacgctgggtggcgagcaccagatgcacaccggcggctcgtgccagctgggtgatgcgctggatggagctttccacatcgttcttggccaccatcataaggtcggccatctcgtcgaccaccacgaggatgtacggatagggggccaccttgcgctgggagccggcgggcgcatgtaccttgccggcgcgcacggcctcgttgaagtccttgacgtggcggaatccgaagaattcgaggtcggagtagcgtgcatccatctctttgaccacccattcgagggcctgtgcggctttcttcggatcggtgatgatcggggtcagcaggtgcgggatgcctgcgtaggcggacagttccacgcgcttgggatccaccatgatcagacgcacctgttcgggcgtggcacgcatgatgatcgaagtgagcatcgagttgataaaactcgacttaccggaaccggtggcacctgccaccagcaggtgcggcatcttggtcaggtcggcggtcacgaagtggccttcgacgtccttgccgatgccggagagcatcgggttcgggtcgcccacggccttgtcggagcgcagtacgtcgcccaagtgcacgatttcgcgatcctcgttcgggatttcgatgccgatggcggatttgccgggaatcggtgaaaggatacgcacatccgaactggccaccgcgtaggcgatgttgcgctgcaggttggtgactttctccaccttgacgccggggccaagctcgacctcatattgggtgaccgaggggccacgcaggaagccgacgactttggcatccacgttgaactgttcgaaggtggaagtcagcgcccggatcacgcgatcgttggccggggtgcgcatcgcatggggctggcctttggtcagcaggttcaggtcgggcaactgatacggcctattggcgtcgtcgtctgtatcgttgccggcggtggcattcggctggccgcccgtattgggcacgccctggccgactccgctgccgtccgcatcggcacccgcgtaggctccggtcgcggctgccgcagccgcggcaccggcggctccggccgctcccatcgcaccggctgcccctgcgagcgcgacagtaccggcctgggcggcactgggtgcccacgggtcgtctaccgctcccccaccgggcatggcgacggtctggccactggtgatgacgcgggttcgggaagcgtcgccatcatctgcatcggcagcaggcacagggctggataggtgcggacggccgtcgtacgaagacgatgcaatggttcgcgcaccgataatctcgccggtcatcggatcgaccaccggggtttcggcggtggcaccatgctggctggcggcacggtcgaatggatcgtcggcagcatacttgtcaagagttttgtcgtcttcggtcttggatttgcggccgaacagtcgtgcgaacaggctgggccgtgcatcgccggcctgatcgttgtcgcttccgtcatcgtcgccgtcatgcgagggaacaccgtcggcaaaggcgagagtggtatctcccacacggacctcgttggggaactggctggcgctcccatccgtctcctggcccatcggcacatacggtttgcgttggattttagcggcgattttgcgcgcatcctccggcaaatcggtgacgtgggtgccggtaatcatcagcaaggagaacaggccgacgaccacgaaaatgatgatggcgaacacgttggaaaggccccaggcgagcggtgagccgaggaagaagccgaacaggccgccggcggattgcagaatcgtgatgtcgaatccggtgtggtcggcggcgatcgccacgtcgatgatcgaacaaatcgaccacatgagcagcacccaaccggtgaccacacgcgggttattggaccctttaccggaattgcgcatgagtcggaaggccacggcggcgagcaacaccggcagcacgacgctcatcagaccaagcacaccggccgcgatggcgtgaagcagctggccgaatggaccgctgacgcggaaccattcggacgcgcagaacagtacggcgagcacgagcagcaggaagcacaaaccgtcacgacggtaggctggatcgtattcgccgacgccggtgacggcgcgtacgccggagccgaacgcgcgcggaatcgcgagcaggatcttcttccacaacggctcaggttcgaggtcaagctcgggctggaccttggtttcgccatcatgggtagacccgttgtctttggatttacggggtttggtgctgttggaggatgctgttcgtgccatatcgggtctgattctactagtacgggggtgcatggttggtgacgacaccgtgacgatatggtcgattgacgaatcccgacagccgattcgccgcgttcgtctgagtcgattccccgctggggcgcgaatatgccttatcatgggttgcatgacacccgcagagcgtgcgagcgcagtcgcatttgcactcaagaactgcgcactggaagcgatgacgccgggcgaggcaacgatgcgcgccgcggctgcctacgaacgcggcttgaagcccgtgacccatctcatcgacgtggcggacgaacagactgccatgcgtctgcgcgccgccgccgaccctgccggaaaggatcgtctggctgccggcagtctggatgatcatgccacggatcgggctgatgcggtgttcgcacgtaccgtgttgttggcggaacgtcgatggaatccgtctggcgacttggatgagctgaccgccattcataaggggctgttcgaaggcgtgtttgaggatgcgggcaagttgcgtacctcaaacaccacacgcgaggtgacgaacgaccgggctcgagccgcgaatcctgaggcgttcttcccggctgggctcattgagaccggcgcgcacaacatcgcgatggagttggcggacaagcgcaacctgcatgcgttggatcgcgacgtgttcgttcacgcgttcgcttctatttatgatgagctcggttatctgcatccgttccgtggcggcaatgcgatggtgctgcgtatattcggttcacgcttggcgcatgacgccggctgggatctcgactggggctcagtgacgcgcgaggagtatcgctccgccaagcactcggcatatcggggcgacacgtctgcactggagacgatgttcgacgcgatactacgcccggcgaatccgacgcgtgtgttcttgatcgccggctggaatcaggggcctgcacactgattgcgggtgattgcatcggcctttggctgattcctacgccgtgatatcgcccagatgatgctgggtgtattcgtcggctcgggcgtcgatcgggtcgtagtcgccggcgtcggcgtgcgcgataatggccatcgcgttgtcgaccagtttcgggttcagggcctgcagccagtggatgcgcgggtcacggccgaaccatcccatctgtttgcgggcgagtcgcttggttttctgtgcgatgtccgcgaaggcgtcgttcacatcccagatgccgtccagcaggtcgatgatctgctgatagccgagcgcacgtacggcggtggcacccagatgcgggcgcaaccgttcgacttcttcgatgaacccatcgtcatacatctgcttggtgcgcaaatcgatgcgatggtccaaatccgggcggtccaggtcgagtccgatctgcacggacggaatcacgtaccggtagcgcggcagactggccgaatacggtttgccggtaagctcgatgacctccagcgcacggatggtgcggcgtggattgcgtgggtccatgcgcgcggcggcctcggggtctttggcccgcaactcgtcgaacaaagcaccggcaccctcggttttctcgcgttcctcaagacgtgtgcgcacgtcgggatcggtgccggggaaggtgatgtcatcgatggccgctctggcgtacaagccggagccgccgacgagaatcggccggatgccacgtgattgcaggtcggcgatggtctcgcgcgcaagctgctggaatcgggccacgctcatcgtgtcttcggggtcgatgatgtcgatgagatggtgcggcacggccgcctgttcctcggcggtgggtttggcggtgccgatatccatgccacggtacatctggtaggcgtccgcgttcacgatttcggcccgctcccccgcttcggccagacgccgggcgatggcgatgcccaaccccgtcttgccggacgcggtgggaccgacgatggagacgactcgttgcgtcatatacgccccctcagtgccgcacggaataggtctggccggcggccacgtcggggtcggcaagcagattatggcggccggcgtgtgtgacggtggccgtgacgaaatcgccgatttcaggtaccggttcgccttcaggcacgccgatgtgcaccagcacgccggttttctcgcggccggtgacacggtgggtgtcggtgtccttcttgccgagtttgccggtgatcatcacttcgacgtcgcggccctcgaatgtggcgaggttctcttcggtgatctgctcctgcaacgccaccagacggtcgaaccggtcctgcaccacgtcgcgcggaatctgttccattgcggcggccggcgtgccggggcgtggcgagtagatgaacgtgaacgccgaggagaagcgcgcctggcgcaccacgtccatggtctgctggaagtcctcctcggtttcgccggggaagccgacgatgatgtcggtggagatctgcgcgtcgggcatggcggcgcggatgcggcccagtatgtcgaggaacttggcggagcggtaggagcggcgcatcgcgcgcaggatgcggtcggagccggactgcagcgggaagtgcagctggtgcatgatattcggcgtttcggccatggctgcaatcacatcatcggtgaaggcggccgggtgcggcgaagtgaagcgcacacgttcgagaccgtcgatggtgccgcaggcgcgcaacagcttgctgaaagcgtatcgatcgccaataccataaccgaacgagttcacgttctggccgagaagcgtaacctccttggcaccatcggccacacattggcgaatctcatcaagaatgtcaccggggcggcggtccttttccttgcctcgcgtggtgggcacaatacagaacgtgcaggtgttattgcagcccacggaaatcgccacccacgagctgatgcgggaggcgcgggcggcgggaagctggctcgggaactgccgcaattgttcagtgacctggacctgcgccttgccggtcgcacgattctgatccaacagcttgggcagatcttcgatgttcttggtaccgaacaccgcggaaacccatggcgcagtatccgcgatcttcttgcggtcaagctgggccatgcagccgccaacggcgatctgcaggttcggccgaaccagtttgacgcgattgaatcggccaatggtgccatacatgcgttcggctgcgttctcgcgtaccgcacaggtattgagcaccagcaaatcgaggtcattgtcattgatctggtcctcggttgcaggcacgtagccattggcctccagcacgccggcgatgcgctcggaatcgtgcacgttcatctggcagccgagcgtatggatatggaacacgcccttgccgcgctcccccagcaagctatcggttccatcggctgcaatcgaggcacgctccgcctcggtcatcatgtcttcattcataacgaccgattctatcggcggggttcgtcatgatccggccacgcatgccattggttgtcacgatgtcaaattatgggttcttggaaagattccccgcgaacgtccagattggctggaatccgccgagtatattggtggacgtgatacttgaccgacatagccgactcaaaacctccgatctgcaagcccgtctcaaagcgttggatcttccgggaggcaccttcactcccgaacaggtcgttgaattcgttgacctcatgcaggtgtatgaaggcgcgatgtacgagatcagcaccaaactggagattctcgacgacgagttccaggtgcggttcagccatgacccgatacatcatatggaacgccgtctgaagtcggtgagctcgatcatcggcaaactggagcgcaagggtctgccgattggcgtcaattcgattaaggacaatctgttcgatgtggccggcatccgcgtgatctgtaattaccgcgacgacgtgtattccgtgtccaactatctgtcgtcgcagtccgatattcaggtgctgcgcgtcaaggattacatcaagaacccgaaacagaacgggtatcgttcattgcacgtaatctacgcggtgcccgtgttcctctcctcgggcgcgcattacacgccggtggaggtgcagttccgtaccatcgccatggattattgggcgtcgctggagcatgcgctgcgctacaagaccgatttgccggacaacaagctcgccgagcattcccagacactgctcgactgcgcgcgctcattgcagaacatcgaggtacagatgcagaacatccaccgcgacatcaacggcgcgccgcaagtgggtgaagcgcctaagacctcggactgaggtgctatggaatcggcctgcggccgattcattcatcgttgcagccacttcggcagcctggccggcgcttgggccagtagggtgccgaggaagatgagggcgcagccgaggtagccgcgcggggtcatcacttcaccgagaagcaacgcaccgcctaccgccgagaagaacgattcgaggctcatcagcaggctggctcgcgtcggtggcacccattgctggccgaccacctgcaaggtgtacgcgatgcccaccgagccgatgccggcgtacagaatcggaatccaggaatgagcagcgccggcccagtcgaccgagccttcgatcagcgaacccgcccagctcagcacggcggtggtgcagaactggccgaatgaaagcttgatggcgtccacggtgccgcccaaagtatcgatcaccagaatatgcacggcgaacagcacggccgtgaacacgagcaggatatccgccaggccgatcgaaccgaaaccatcggtgatgcacagcagatagaagccggcgatggacagcgccacggccacgaacaccagcatgccgatgcgccggcgcaggaacacgaaggccagcaacggcaccatcacgatgtacatggcggtcaggaatcccgcgcggccggccgatttgccgtacagaatgccatactgctgcagggtgctggcggtgaacagcacgatgccgcagatcacggaaacgaccaccgggttagcgagcaatcgcgccacggccgaatcgggcttgttcgcattcagcttggcaccggtgatggtaacgacgtcggatgcaccgttcgatgcggcatctgtggagacggccccggatgcctcggccccaacgacatcggccccggctgtatcgcccttatccgcgctcccccggccacgctgccacagcagaatcggcaccaaagacagtgctcccagcgtgaagcgcgtggcgttgaagaacatcggcgacatcgaatccataccctggacctgcgccacgaacgcaaaaccccagatcagcgcggtcaacaacaggctcagcatgcctacgagttcttgtcttttcacggggagccagcctaacgtgcgaatgtgacagacatgaaaaagcccggccacaatgtggtcgggctgtgacgtttgacgagcaggctacatgccgctcaccaatcggctggcgaggctagtccctgttgccgagcagctgcaggatgtacaggaacatgttcacgaagtcgaggtacaggttcagggcgcacaggatggagatcttcttgaccatttccgggccctgggcctcgtattcggtcagcagcgcgcgcgtggactgcgcgtcgtagatggtcatgccggcgaacaggatcaggccgatggcgcagacgatcttggtcatgccgtcgacctgcacgaaggcgagcacgatctgcgagatgatgagcacaatcaggccgatcatcaggatcgggccggccttgagcatgttgaacttggtagtcatgccgaacatggtcagcgcaaagaagaacgcggcggtgacaccgagtgccacgccgatcgagccgaggtcgtagaccatgaagatcgagctcaaggtgaagcccatcaatgcggcgtacacatagaacatgacgcgcgcggtggccgacttcatcttggtgacgcgcatgccgagcaccacggccagggcaatctgcaccacgcacaggccgatgaggcccaccatgccggtggccatgaggaagctgtagtaggctccagtgatctggccgagcacggcgaccacggcggtgacgaggatgccgatggtcatctcgccgtacaccttggtcactgagactcggcgggcttcctcatagttgtaggtcatcgtcgtgttgatggtggccgcacccgcaccggcaccagtaccctgcggcacgtattggtaggtgggagcgccctgcggctgggcatagtagttctggccgtaaccggactgtgcgtattgctggccatatccagactgttgggcggcgttgtaatcaggcgtgttgtattgcgggttgtattgcccgttgttctggggctgctgaccgaatgtcataatcgctcctttagcgtttgttccagtaccaatcttagaggaacaaagctgaacattccatgaatatgatcgatcggctcgttctgctcatctcaaagcgtaacgggcgtttccaccatgcgcgtggcatgcacttgagattcgattgacattcgatcgcagcttggaccgccgcgcgattcactgcaacgtgaaggtatgcgtcaccttggtgtcttgatccgttgataggaacgcagtgacatccaccgtaatcggcgaatcgtcttgcagcacatagcccagcgtcaccgttgccgcggtcccgggctgtgcttgggccaaatacgaattcgcgtcatagccttcaggctgatcgaagtatactgccgtctccagttcggtgccgttctggaacacgttcgggtgagccaaagtggcgaacgagttgttcttggacgtgttgttcgtccattcataagtcaccagagcggtgggcttgccgttatagtcgttgacgcttttcacggcggagactattttcacgtgggcaccttcgatatcaccttccaaatcctgctcgccctgcgctttctgctcggatgccttgctcttggaggcatcagacgatttgcccgcggactttgatgatgaggattgtgacgtgtcgatgcccttggactccttaatggaatcgtcaatggccttgctggcagcggactgcatggccagcgtgatcacaatggccaacaccgacagcaccgccgccacaatggacagcaccttgccgcgtttcttgccccggaaggtgcccactatggcgataatcgccagtatgacgccgatgaagccaaggattgcggcgatattgttaacgatgggaataaaactcagcaccaaacccaacgcgccaaacaccacggccgcgatgccgcagatggtggtatgcagatgttgcggttgcggcggctgaggctgaggctgttgtggctggtactgctgtggggatgagggaaccggctgcggggcgatgttgtggttggacatgatgtgctccttctcgtatcttccccgaaatagggatgtgagcacgacgctaccggccgcgaaacagcgacgttagtggacgaacggtcattgttcgttgcctgttcgggcaatacggaggtgataacggtgcccgcatgtccagtggcgggggccggatgcaggtcatacagtggaaagcatgacgaacccacaacgcgccgccgggccataccccggtttccgacccggctcacggcctgacgctcgccctatgcccggcacggggtccccggttcctacaccggatacggacgaggtgcccgtgactacgcgcgtatggtgttcggtcgttatggtgccattggccagtttcatgtgcatggcgcaaacctcgttcttcgcccagtattttgcgcaggattccgcaggatacacgctgatggtcctctgcaccttgctggcattcccggcagggttcctgctcttggcccgcagcgaatacccggaggcgacgttctggatcgcctgcgcgctggtggtcgtgttcccgtatgactcgctcatcgcactgatggcgatgacctcattgctcgcccgtcgttcaaaccggaacacgaccatccgcgccacggttggcggcaccatcgtgacgctcatctcccagctccgcgacgccctgcaacagcccaaagcctcgatttggcatctgtttttcgctcaaccgcataccggcggcgattcaggctccccgatggtgatgctggtggaggagccgaccgtcatcatcaccgccacggtggcctcactggtgttcgtgaccatcgctacgctcatcggcctgcatatccgttcgcgcgcccgcctgcgcacggcgaatgcggtggccagcgcggccaccacgcatgccgcgaccctgcagaccgacctgaccaaccagcagctcgccgacgccatcgcagccgaagcgcacgacaccctcgcgcattccctgtccctgatggccctgaacgccagcgcgctcaaggcggaggcggccaagctcggcgactcccccgaagcgcaatcgttggcggataaggccgaggacatccgtcggcagtcggccggggcattggacgaggcccactcgatcatcgacatgctgcgcaacccgcaccaggcatgggagcagctcgccccgtccgacgacacgtcgctgacccgcgaatcgctggatgcgctgattgcggacacgcgcaactcgggcacgtcgctcaacacctggatcgatatccagcagctgagcgtgatggatgagtcaatcggcaaggtggcctaccgcgcgatccaggagggattgacgaacgcgcggcggcacgcgcccggagcgccggtgtcgttggaggtctccgccacgccgcaggcgggcgtacatatccatatcagcaatccgatcgccacggatgcgaccgagacgcagcgggcccatggggccggactgcctggtttggcagcgcgcgtgcactcggtcaacgggcaatgccggtatgggatggacgatcggcacctgttccatgtcgacgtgcaactgccttggcgcagctaagatggctagcgtgagtgagaagaacgggaatagtgtgtctggtggaaagcccgaacgcggcggtctgaccggaagcggcaccggcctagagcccaagccgatccgggtcagcgtcatcgatgacgatccgatgatctgccaggcgatgagcctgatcctcaacgattattcccacgggcgcatcgaagtcgtctccacgtccaccgatggcgagacctgcgtgaggcgggctgccgaggaaaagccggatgtggtgctgatggacatcgccatgcccggcgtggacggcatcgaggcgacccgtctgctgcgctcgttctcccccgcgccgcacgtgctgatcctgacctcgttgagtccgtccggcaccgtggaacgcgcggtggaggcgggcgccgaggggttcgtgtcgaaaaccgatgcggcggacgatatcatccgccgcatcatcggggtatgcgagggcgcgccgcagttcaacacggccagtcagaaacagctgatcgacgatctgagcgtcacgcggccgcgttcgcgccgcgatgaggcgcgcgccctgctcgacgcgctgcccgaccgcgagcgcgaggccgtgatgctggcggccgagggctatacgaacgccgaaatcgcctcccgcatgttcatttcggagcgtacggcgaaggcgcatctttcttccgcggcgaacaagctcgacatgggccgcgtgcagatggcgcggctggtggagcgggccgatctgccggcgcggctgtaagtcgtccggttgttgagccgtatcagtcataatgggaatatgagtgaagcgattattcgaacattacgtagggatgactatccggcgctgatcgacctggtgcgccgcacctggtatgccgaattcgatgagcggaccggtctgctggcggccgaagcggactgggagaactgtctggcgcgcaccaccaacgcgttcgtcgccgaactggacggccagccggtcgccctgatcgtggggcgcgtcgatgcgctggaccatcggagcccgctcaactcgcatcggatcaactcgtggaacgcgctggcgcgtctcgtgttcgcgaagggcggaatcaaggccgccggcgagattctgggcattctcggcatcgacaaacggctgcgcgcccaggccgcgagcgccgggcatgactatgcggcggaagtggtgctgttcgtacttgacccggcggcgcgcggccacgggctgggccggcgcatgttcgagacgctgatggacgcgttccgcctggccggcgtgcgcgactacttcctgttcacggacaccacatgcgatgtcgggttctatgtgcatcgcggcctgacgcaggtgtgcgagcagtcactgcccgcatccgtgccgggagaaaacccgtcttcgttctacttgtatgaggggtcggtgcccgagccggcgtgatgtgcccgccgtcgggcaaacactggtaggcttgagcacaagttggtatgccggcataccgtccacaggccggcgacgaaggggctgacatggcaatcagtgcgaaggaactaccactcgggaaagtgttcaccccggatttccggttcacgatcccctcattccagcgggcctacatctggaagaccgagaacatcctgcaactggtaagcgacttggatgacgcctgcaagtcgcccggtactccgtacttcctcggctcgctaattctggtgcgcgagggcgataaccgttacgacgtaatcgacgggcagcagcggctggtatccctgtcgatcatcatcgccgtgttgcgcgatctggagcgagacccggacctcatgcgccaactcgacgcgctgctggtggagcccggcgacaagctgcgcggcatcgtcaccgagcctcgcctcacgttgcgcgagcgcgacgcggcgttcttccgcgaacacgtgcaggaggacaacctcgaatccgtgttcgacatgaacgacgacgatctggcgaccgctgcgcaacgcaatatcgtcgccaacatccgcaagacgtacgacgagatctccaattggtcggcatccgaacgccagcaattcgcgcagtatctggtcaacgaggtgacgctcgtcatcgtgaccaccgacgatctcgacggcgcgcatcgcatcttcgacgtgatgaacatgcgcggcctgccgctcaccccgtcagacgtgttcaaggcgcgcgccacggccagcctgtcgaccgccgaacttgacgtgtacgccgcccgctgggatgacatcattgacccgcttggcgacgatccgcatgactgtgaggaattcttcgcctatctgcatctcgtgctcacgcacaagccggccaccgacaagctcatcgaggatttcctggccgacgtgctgcaaccgtacatcgacaaaggcacggtgcccacgttcatcaaccaggtgctggcaccctacgcgatggcgtggcggattatcgcgcgccccagcgataccgtactgcccgccgaggtgcgtagccggcttgagggattggacgattaccgcagccacgagtggaagcccgtggccatgtgggcgttggtcaattcgtatcgcgggctgggcgacgccgatttgtcgccgttcgtggttcgtgcctcgcgtatcgccagaaccacggccacgttggaatcgttgggcgcccatgacgagcgtcggctgctggaaattctgaccgcattggaacaggtgaccggcatccgcacgctgaatcgcgctggaacgttggagcggcgcggttatgcgaacgccgccatccgtgatcttgacaagggctatttggtccagcgcgtgaacgggttgcatgtctcggacggcgaccgtgaaggcgcattggtccgtttgcatggcgagatgcagggtgacggcgatttggtccgtctgctgctgattcgcgccaacgagcagaaggccggcatgcagttggatcgaccacgccggttcagtgcgctgccgattatgccgttggatatcgaacggtcgaaatcgtttgcggactggccgcaggatcagcatgatttctggatgtaccgactcggcaatatggcgctggtgcagggccctgaggatcagttggacaggttgagtgaatatccggcacgtcgcgaccgcatgctgttgcgcgcggattcacgtcgtttcccgctgaccaatcagttgaaggatttcgctgactgcacacctgccctgctggaggcgcggcaggaagagtcggtccgactcatcgtggaatactggggcatccggtatgacaaggacgcccgtgatctgaccaagcagaatgtcgatgagttgtcgaagacttctccacggccgtctcatagttcgcggcgcgtcacgatccggcaggtgattgacgctggtctgctggtgccgggcgagcgtctggtgtgggatcggccgcgcaagggcgagcgctggtttgccacggtcaccgaaaacggtcgtctccgtctggatgacggctccgaatatccgactccgaccgccgcggcccgtgccgccgccggaggacgtcgcggcggcggtctggacgtgtggaagcgcacacgcaacggtcagaagctcagcgacatctggaagcagttccgcttacaggcgcagtagtctacagtagccggcacatcattggtggctcccctccgtgagggaagccaaccgctcatttattccagtgccgccacgcagtgccgccacgatttcagccggtgttttgcaatattcgggaaaatgactgattaattcggcatccgatgtgaccacacagttggcaccggattgttgcgcggcaacgatgatcagatcatcttcaaaatcccgatgccgtttttgcagggaaaaagccctatcacatgtcgactcatcgacagcgacaatgtcacacatctccttcacctgctcgatacaacgccatggcacccgtgacgacagaaagccgcgagtgaaattctccacttccgattcattcggtttgaattcgctacgaatcgccgatgatgataggtatgcgatatccttcagcgacaatgacgcacacaacaacgtaacgttgttcttcgcgccaagttccataaccgcttccgccatcttggcgtgatcatcgcgatggagcaaatagtccaacagtacattggtatcaagcaaaatacgctgcatggaaacgtcggtcatcaatcggccctcttcatgttgtaatacgtatcaagttgctcgtcgtacattttgtcgcggaactgcttgtaggtaaggccttccatgaggtcggtgtcttctgagatcagtccggccttgaccagttccttgtgtacgtatccggcaccttctcgaatcagtttcagcttgcgctgcttttcctcctcgcgggcttgctcttcggcggtcgtttccaatgccggcacttccttgcggtcggcgatgtacaaccacagcgaccggattacgtcactcaccgatacgcctttgcccttgaggacttcttcgacctcgttcttcagtttcgcatcaatgcgaacgttcatttggaccatggtcatggcaacctccatttcgaagatgctatacagtatagcattttggcatgcgtggaaaaggccggtatccgttggcggataccggccttgctcccctcagtcagcttcgctgacagctcccctcaagagaggggagccaagaaggtggttacttcatgaggttgcgcagcacgtactggaggatgccgccattacggtagtagtcggcctcaccgggcgtgtcgatgcggaccaccgcgtcgaactcggtcttggagccgtcctcgtgggtggcggtgacgtggaccgtcttgggggtcacgccctcgttgagcttctcgacgccggcgatatcgtaggtctcggtgccgttgaggcccagggactcataggattcgcctgccgggaactgcagcggcagcacgcccatgccgatcaggttggagcggtggatgcgctcgaagctttcggtgatcacggccttgacgccgagcatcaccgtgcccttggcggcccagtcgcgcgaggagccggtgccgtattccttgccggcgagcaccacgagcggcaccttgttgtcgatgtagtcgcgggaggcttcgaagatcgtggtcggcttcttggcgaggaagtcgtaggtgaagccgccaggcgtcacctcctcgcccacggaggcgagcagctggttgcgcagacggatgttgccgaacgtgccgcgcaccatgatctcgtggttgcctcggcgagaaccgtaagagttgaagttcttcggctccacgccgcgctcggtcaggtacttgccggccgggctggaggccttgaacgcgcctgccggggagatgtggtcggtggtgaccgagtcgcccaggagggccagcacacgggcgccgtggatatcggcgaccgggtccggcgtggccttcatgccgtcgaagaaggtttgcttgcgcacataggtggacttgtcgttccacgcgaacagctcgccttccggcacgtcgaggcccttccagcggtggtcgccgtcgaacacggaggcgtagtccttgaggaacatctcgcggctcacgctgccgtcgaccacggcggcgacctcggcattggtgggccagatgtccttcaagtacacgtcgttgccgtccgcgtcggtgccgagcggctgggtctcgaagtcgaagtccatcgtgccggcgagcgcgtaggcgatgaccagcggcggggaggccaggtagttcatcttgacgtccgggctgatgcggccttcgaagttgcggttgccggaaagcacggcggtgacggtcaggtcgttggcgttgatcgcctcggaaatctcgggcagcagcgggccggagttgccgatgcaggtggcgcagccgaagccgacgagctggtagccgagtgcatcgaggtcgtcctgcagccccgcggccttgaggtagtcggccacgacctgcgagccgggagccagcgaggtcttgacccagggcttgggcttaaggcccttggcatgtgcgttgcgggcgatcaggccggcggcgatcatcacggacgggttggaggtgttggtgcatgaggtgatcgaggcgatggccacgtcgccgttttcgatgtcgaaatcgccacggaagtcggtggacacggccaccggatccttgacggtcttctcggtctcgtaggcgggggcggtcttctcgaacatgctcttggcttcggacagcagaatgcggtcctgcgggcgcttcgggccagcgatggacggcaccacggtaccgaggtcgagttcctcgtattcggagtactgcggttccacgtaatccgggtcggaagcgtcgccccacagcttgttggccttggcgtaggcttcgaccaacgcgacctgctcttcggagcggccggtcaggcgcaggtagtcgagcgtgacattgtcaatcgggaagatgccgcaggtggagccgaactcggggcccatgttgccgatggtggcgcggttggccagcggcacggaggcgatgccttcgccgtagaattccacgaacttaccgaccacgccgtgcttgcggagcatgtcggtgatggtcaggaccacatcggtggcggtaacgccctccgggatggagccggtgagcttgaagccgaccacgcgcggcacgagcatggagatcggctggccgagcatggcggcctcggcttcaatgccgccgacgccccagccgagcacgcccagaccgttttcggtggtggtgtgcgagtcggtgcccacgcaggagtcgaggtaggcgagcgcgttgccgttggcctcggccttgctcatgaccaccttggccaagtattcgatgttgacctggtggataatgccggttcccggcggcaccacgcggaagttcttgaatgcctgctgaccccagcgcaggaactggtagcgttcgccgttgcgctggtattcgatgtccatgttttgctggaccgcgtcggcgatgccgtacttgtcgatctgcacggagtggtcgatgaccatgtcggactggacctgcgggttgatgacctccgggtcgccgccgaggtccttgaccgcgtcacgcatggtggcgaggtccacgatgcagggcacgccggtgaagtcctgcatgatcacgcgggacggcgtgaactggatttcgtggctgggttcggcgttcggatcccagtcgagcagggtcttgacgtgctcgtcggtgatgttggcaccgtcgatgttgcgcaccagattctcgaccagtaccttcagcgagtacggcagatgatcgatgccgtcgagattggcgatgttgtagtaatcgaagtccttgccggctgccttgagggtagccagctggtcgtcgcgtaaggacatgcttcctccgaaatcatgaatcggcttatgatgccgctgattatccgctacacatggtacgggcacgttaccgaggctctggcgtgtcggcttgaagtatgagacaatcgcgccgccgtctcaatgccgacgcgagagcttgcccgtcagtccgcgcacgagcggcgccagccacaggcacagcgcgaagatcagcgcggaaccggccaacgcgatcagcgtggccaccatcgtggcgccggtcggcagaatcagggcgaagaagttcgccacgaacgggacgaacgcgccgattacgcccgccgccgcgaacaccgccaccagcacgccacgccaaccgttgagtggtctggccacgcgggccagcacgaacacgcccatcgcgaacaggatgatggcgctggtggcgcgcagggcggacaggtccgcggcatcgccggtcacgttccagcccatgaccggcggcagcacccaagcggccagcagcaccgacagcgcggtggcgatgccgcccggcagcgcgaacgtgaccacgcgcttgaggaatcccggaatatagcggcgcgtgttcggcgcgagcgccagaatgaacgcgggcatgccgatggtgagagcgccgatatacgtgatatggcgcggcaggtatgggtatgggatttgcgtcagcactacgccgagcgagatcagcgcggagtacacggttttgacgaggaacaggctggccacgcgctccatattggccatgacctgacggcctcgcgccacgacgtccggcaggtgcgagaacttcgaatccaccagcaccacctgggccacggccttggtggcgggtgccgcattgcccatggcgatgccgaggtccgcctccttgatggcgagcgcgtcgttgacgccgtcgccggtcatggccaccacgtggttctgcgtgtgcagcgcttgcactatggccttcttctggtcgggcagcacgcggccgagcacatcgacgttttcgagcacgcgggccagttcgttcacgtcctcgggcagttcgcgcgcgtccatcgccaccggctcatggtcgcctgtcagtttcactctgcgggcgatggcacccacggtcactggattgtcgccggaaatcacacgacagcgcacaccctgctcacggaaccaagcgagcgtccgctcggcgtcctcgcgaatcttctcagagcacaacaccaacgccatcggctcagcctgcacatccagttgcgggccgtccgagacattggctccctcaactgctcccctcagtcgcttttggcgacagctcccctcggagaggggagctgtagaccgcgcaaccagcaacacacggttgccgtcattggcatactcgttaacctgctgcaacaccgacgaatagtcaccctcaagcgcagaaataatcacctccggcgctcccatgtaccaggtctcgccggatttacgcaccgcactccatttgcgcgccgaagagaacgggacacgagactcaaccgcacctgccccatatccttgggccttgagcccggcgagtacggcttggccggtgccgttgggctgctcttcgttgcagcagtcgtagagggcctgcgtggctgcctgttccgcagccgcattggcggaatcgagcatcacgagccggttgaaggcgataccgccatcggtgatcgtgccggttttatcgaggttcagcgcgtccacgcgagccagtgtctccacggattcaagctcctgcaccagcgtattgtgacgggcgagacgcatggcggccaccgcgaagttcagcgaagtcagcagcaccaagccttcgggaatcatgcctactacgccggcgaccgcggaaaccacggcttgccgccattcgccggtggagagtgccgtgccccaaccgccgaccgtatgaatctgcgaaagaatcagcagaatgcacagcggtaccacgaggaaggtcatgaatttcagaatcgtgttgatgcccttgttcaggtcggacacggttttcttgtataccttggcctgcgcggtgagcgtggcggcgtaggaatggctgccgaccgcattgaccttgaccaatgccatgccggagaccgcggtggcgccggaatacacctgctcccccaccttgtggcgcacggtacgcgattcgccggtgagcatggattcgtcgagttccagtccccaggtctggatgatctgcccgtcggccggcacctgttcgccggcacgaatccataacaagtcgtcgagcacgatttcgttatgagatacctcgacatccttgccgtcacgacgcacgaggaattcggaggccacaaggatggaaagcttatccaacgtgcgcttggccctgagttcggtgacgatgccgatgcccgtgttgatgatgatgacgaaaccgaacaccgcgtccctccaggaaccggtgatcagcaccagtaccatcgcggcgaagatgatgccgttgaacagcgtgaatacgttggctcgcacgatatcttgaaccgaacgcgaggtggaggttttcaccgcattcgattggccactttcgatacgttgcaccacttctttgggggtaagaccggttgctccgatctcaggcatttccacggctgttgttgcactcatattccccagcctaccgcgtcttgtttcgcaatccgctaaggctcagggatgattcagggtgctttctcagcttcaaggggctgattcggctcaggagacggtgactttgatctcgcgttcgtggggttcgtcgcgcgtgatggtgagcacggcgtcagtaatagtcattggcttggtatcggcagtgtcgccagaatcggcactgttggtgttgaggtgaaggatgacggcgtacagcagttcatcttcgggcgcatgctttggatcaatgagagcgactggaataccggcttcacgcgcattggtcaacgtctggttccagctctcccggttggcgtcggtaacgtcgatgccgctgataaccacgattttgaccgcgcgagctacgaaatcggcaacaccctgctgtgcggtggccgcattcttgtcgacgccagtatgagcatccatactatcggcaccgttttcgctggtagtgccggcgtcagaagattcggtttcaccggatacaccatcagttgcgtttgccgagcttgcggatgtttcgagcgaggcatagtagacattgagtttgtcatcagacagcgcattgatgacgaactcgtctgcggcggtgtcagtcgaccccacaaagccgactgtgacatccgtgggatgtgtggaatcgtgggcgacttccggcatgctgtcttgggtatcgccgaccgccctaccggccggcgtgcaggcggccagggacaacacagccgccatgcaggccagcaatccgagaattcgtcgtgtcatatgctcacctgtcagcgggtaaacagggccaccgtctcaacatggtgggtcatcgggtagatatcgaaggcacggatgtccttgagccggtacccttcgccggtcaaggtggcggtgtcgcgtgcgaggctggtgggatcacaggcgatgtagaccacgctggatgcgccggccgcggcaatctggcggcagaccttggcacgagcaccggcacgcggcggatcaagcactacgacattcggtttggccagatgcgccggcacatggtccagcgtgcgcgagacgtcacccgcgcgagcgtccacgtcgttcaggttcatggcgcgcaggttacgctgagcgttcttgacggccacacgcgcgccttcaacgctgagcatgcgggtgcgttcaccggtcattgtggccagcggcagggtgaacaggccggaaccggaatacagatcccagattacggcgtccgccgctgactgcagctgcccgttgaccaggttgatcacgtgcgtaccgagggcgatcggcgcgtggcgatgcacttgccagaaaccgttggcgtcaacctgatagtcgaaggtcgtgccgttgatggtcacctgttcggtgagcagctgggagccggcgcgcagttcgccgtccacaagtacggcgtaattgtcgtctgctgccgcggtatcgacgatctcgccgcgcggttcgggcacggaaagacgaatctgggagccgggttcaaagccgccctcccacacgtgttcgcgcttggcgacgtccagcagcgtgcgcgtggcaagcggcatggtgtcgatggccacgcggttgtgtgtgccgcgccggcgcatggatggcatgccgttgtcgtcggcaatcatttcgatgcgggtacgccagttgaggccgccggcttccttgtcgccgggcatgcgctcgatgggaacggccacgtcgatatggccgagtcgtctcatctgttcggagacggtgatggccttccacttgagctggccgggcaaagagacgtgcacgagatccgcgccgcccactcccccgcccatcgccaagggaccggcaagtggccatgccggggtgactcggtcttcagacggctcgagaacctcgacgacttcgccggtccagaaccggtcatcccggtcgtggggctcgtcaagctcgactcgcacgagttcgtcgggcaaggcgaagcggacgaacaccacacgaccgtcgatatgggccacgcagcggccttggtcggcgtatcgttcgatacgaacttcagcttgcatcatcgtcctttccgattgcgcgcggttcgagttcggcatcaacagcgacttcagtctgtgtcttcttagccgcgaccttatgccggtgcatcggcgtggcaataatgaggtaactcacccaaatcgccaatgcccagaacggaatgcccatgagcaggcgggtcacaccgagcgcggccacatggttggtcagatacagcggcacctgcaccaccagccgcagcaggaacaggccggcccataggccggtgacaatcatataggcgcgtttcagggccttgtcgtccatccagtcatggaaccatgccttgaaatgctcggtgggcaggctacgaatgaattcgacgaccaaacccagtccgggcacgcgcgcaatcagcgacacggcaagcaacgcggcatagccggcattggtaatgaatccgaagatgtagtaattgcgggcctcatgagtctgccatgcccaaatcaggcagatgcctaccgccaccagaccagagaccgcgcccattaccgactggcgctgaatcagtcgcacaataacctgcgataccgccagcacggccgaaaccgcaatggtgagattcagattgctcgtggccacgaacagtacgacgaacaccacgccaggcagcatggattcgatgacgccacgcgggccaccgatggcgtcgatgacggagaaatcctcgccttcattgccggcgtcggctagagcggacaggccggtgcgtttgttgtctgccaagtctcttcctataaatcagcgaacttcggagaacatcgggccgcgagacagcgtggtcttcacttcggtctgctggtcctggctcagcggacccttcggcttgttgtccggaatgtccttgaagtgttccttgccgttctcctcgccggcttcggccgcggccttggcggccttacgctcagcgggggcgaccggcggatgcatcgggatcagatcgcgcggcgccaaaggctcctcgccacgctcgacgacgatgtcggcgaagaacttgttcagcgcctcggtctccgggctgtccggatcgatagcagccttgccggagaagatgccacgcagcatccagcgcgggccgtccacaccaacgatgcgcgtgttcacggttttgccgcccttgacattgaccggcagcttcagttcggtgccgaacacaccgtccacttcagaagcggccttgttggcttcaagcaggtcaccgcgaacgtcatcccacagtcccagggtcttgggtgctgcaaaggcttcgatctccaggctggaggagccgaaggtgatggtggaaccaagcacttgctgggtggcgcggttggccttgatacgcagttggatgccccggaggaagggcaggtagtaggcgcccagatccagataatcgtcataatcgggcacgtcctcatcattgacgtcccacgggcctcgctcttctccgcggccctggtattcgctggccggttcggcgagcacggtctccgcgctctcggcctttgcggcagcgttcgcttctgcggcagccaccttgtcttcatcgacaggctcaacggccggctcggcttccttcttgctcttcttcttgccgaatccgaacagtcccataattcctcgtttcatgtaacggttgcaaccttgctaacactagcactcaggcttagagaaagctgagtcacacgtcgtatgtgatggtaagtggcgcgtggtcggaccaacgcaactcgtatgtgggggccttgtcgatcacaaagccgcgcgcggtctccgccagctcgggcgtggcgaactggtagtcgatgcgccagccgacattgttgtcgaaagcgcgcccgcgctggctccaccacgtgtacggaccctgaatatcaccggcgagcgaacgcatcacatccacaaactcatattcatccagccacttgtccacgtaggcgcgctcctcgggcaggaagccggcgtgcttttcgttggccttggcgttcttgatgtcgagcggcgtgtgcgcgatgttgaaatcgccgcacaataccgcctgcttgccgccgtgcgcggcctcgtcgcgcaactcgcccatgcgagtgagcatcgtgtccagaaaacggtacttctgttccatcttggtcgaatcatcggtgttgccggcgtgcacgtacacgcaggccacggtgatcgtgtatccctgcggcgtcttgacatcggtctcaatccaacggccggaatccacatcctcgctcaagcccggaagtccatagcgtttatcggtcacctcaagatcggtgaggagcccgactccggcacgacccttgacacggcagacctcgttcagcgaatgcaggtcagagggtgaggcgatcttgccggcggtggcatactcgaaaccgaattcgccgaaaatcgaatcgacatcctcttgcggggcgcgcacttcctgcatacaccagacatccggagcatgtttgccggcccagtcctcgatgcccttgcgctttgccgcgcgaatgccgttgacgttcgatgtggtgatggtgatggtcatgcagccatactattttggcctctctaccagtaccgcactcacgattacattgaggtataaaaaattagctccctcataagagggagctaatttagaatgtcctatcagtccaaaccgagctggagcttgccgccggggatggcgtcgagcaggtctcgggtgtactgcttctgcgggtggtcgaagacctcgtcggtggtggcatgctccacgagcttgccgtgctgcatcaccacaacctcgtcggcgatctgacgaaccacggccagatcgtgggtgatgaacaggtagctcaggcccttttcggcctgcagatcgttgagcaggcgcaacacctggtcctgcaccagcacgtccaaagcggacacggcctcatcgcacacgatgacgtccgggtccagagccatggctcgtgcgatggcgatgcgctggcgctggccaccagagagctcgttcgggtaacggcccatcacggaagccggcatctcgaccatgtccagcagttccttgacacggttggcacgccacttcttgtcgccgatcttgtggatgcgcagcggctcctcaatggaacggaagatggagtacatcgggtcgagcgaaccgtaggggttctggaacaccggctgcacgtggcggcggaagcccagaaggtccttggacttgaacgtggaggtgtcgcgaccttcatagaacactttgccggaggtgggcttcaggaggtgaagcaccatgttcgccacggtggacttgccggaaccggattcgcccacaatggccagtgtggtgccacgcttgacggagaaggacacgtcatcgacggccttgaacatctccttcttgcggggcagcttgaattccttggtcaggtggtcgacggtgatgatgtgctcgctcttttcgagcgtgctttcgccggcgatgtggtgatcgagcagagcgtccgcatcctcaccacgctccttggcggagatgatgcgctgggaggccagcgacggggcagcggccaccagtcgcttggtgtacgggtgctgcgggtgctggagcacttcaagggatgggccggattcgacgacctgacccttgtacatcacgacaatgtgctgggcgcgctcagcggcaaggcccagatcgtgggtgatgaacagcacggcggtgcccaacgagtcggtgagcatgtgcaggtggtcgaggatgcgcttctgcacggtcacgtcgagggcggaggtcggctcgtcggcgatcagcagatcggggcggcaggccaagccgatggcgatgagcgcgcgctggcgcataccaccggagaactcgtgcgggaactgacgggcacgggtagcggcgtcgggcagaccggcctcggacagcagacccgcgatacggtcatccattgtggagccggtgacgtacttcttagccagataccaggcctggtcgtcggccacgccggccttgatgaggtcgtcggccacgcgccaacgggtttcggagcccggaacccattcgttggtgaagcgggcgacggccttgtcgaaggcctcgccggacacgccggcttcagtcaaagccttcttggcctcggtcatgagctcgggcagttccttggcgccgaggaaggtctcgtcgtcgttgcccttgacttcgacctcgtcgccggccagagccttggcaagggcggagcgcttttcgtgagccacgtccatgttgttggccttcagtgcttccttgacctgggtgccgatacgccacaccgggttgaggttgctcatcgggtcctgaggcacgagacccatcttggtgccgcgcagcttgtcgaactcgctctgcttggcgccggcgatttcctcgccgtcgagcttgatggagccgttgaccacgtgaccggtgccgggcagcagacccagcacggccatggcggaggtggacttgccggaaccggactcgcccacgatggccacccactggccagggtagacggtgaagttggcatcgcgcaccgcgtgcaccggcttgccggtgtcagtggtgaagtcgatggccagatccttgacctcgagcagcggaccatgctctttctgcatagccagcatcttggcgttggtgttgtcagtcataatgattctccactcccctcactcaggccgtacggctcttcgggtcgagggcgtccttgacggcgtcgcccatcatgatgaacgcaagcacggtgatggccagtgcggcggacgggtagaacagcaccatcggatcggtctgcaggttggtctgtgcgctggagatatcgccaccccagctcaccgtggtggtcggcagaccgacgccaaggaagcttagggttgcttcggccacgatgtaggaggccagcgaagtggtggcgatgacgatgatcggggccaaggagttcggcaggatatggcggaacagattcctggcaggcgtggagccgagggccgtggaggcggtgttgaattcgaggttcttcgattccagcacggcgcttcgggcgatacggcatacgccgacccagccgaagagcgtcagcaccagcacgatcttccagatggacttggaggtcttgaacatctggagcaccacgatggcgccgagcagcataggcagggcgaagaagatgtcggtgatacggctcagcaccgcgtcgacccaaccgccgaagaagccggcgacggcaccgatcagggtaccgacaatcacgaccagcagcgtggagagcacgccgacggacagtgaggtacgggtgccgtagaccacgcgggtgtacacgtcgcagccctgcaggtcgtagccgaaggggtgtccggcggaggcggggctcaaggagttgcccagatcgcaggcgttcggatcctgcttggtgaacagaccgggggcgatggccaccacgatgatgaagaggatcagcagcccggagatgatgaacagcggattgcggcgcagggttcgccatgcgtcggcccacatgctggtggccggtgcggattcgtcgacggaatcgacgtcctgcaacggggtctcgtcgagaggagctacgtaacggtcctgaccgggcagggtttccatgaagtattcggttcctggctcgccggtctcgttgagctcgttttcagtggtttcgtttgccatgtgactcactcctccctatcacgcgtaacggatacgcggatcgagggccgcgtacagcatgtcgacaacgaggttgcacactacgaaaatcagcatgagcaacgtgacgatggacaccaccaggtttgcctcgcccttcagaatggactggtaggtgaggaagccgatgccgtggatgttgaagatctgctcggtgatcatggcaccacccatcagggcgccgatgtcctggccgaggtaagtgacgactggaatcagggagttacgtaacacgtggcgcagcatgacctgaccgttcgacatgcccttggcgcgtgcggtgcgcacgtaatcctcggcgatgttggaggagatttcggagcgggtcagtcggatgatataggccatcgacaccgaaccgagcaccatggccggcatgagcagatcaaggaagccggggtcggcgcctgccgtcaccggcaatatcgcccactgaataccaaagacatattgcatgacgaagccggtgacgaaggtcggcacggaaataagcagcagagagacgatcaggatgacggtgtcgtaccacttgcccttcttgaggcccgagataatgccgaagacgacaccgaaaatcgcctcgaacacgaacgccatcaagccgagcctgatggtgaccgggaaggcgcgggtgatttcgtcgagaacgggctggccggcgaaggtatcgccgaagttcagggtcagtgcattcttcaggtagataaagtactgaacgatgaacggctggtcgagatggtattctgcgcggatctgggctgcgacggcctcattgacgggcttgtctccgaacatggccttgacagggtcgcccggcagggcgaatacaagggcatataccagaagagtcgtaccgagaaccacgggaatcatctgcagaatgcgtcgcagaagatacttacccatacggttgctccttatttcctagaccggccagaaagggtatagtacgcccccgccggtcgataaatactccgacagtttaccgcatgcccggactgtgatatgtaaatttgcgttaacgcaaggtttgagattgggcaatgttggtggatatgtccatggttgcggtcggatagtggatactttaacttggttcccgatggcgtgagcaagcacccctcacacaacaaaaagggcggggatcttgcgatcctcgccctttatttccgaactacctaacggtatccgttcagtgagtcagactcacttcttggacatctcggtgtaggtcgggaggttctgccaatcgaaggcgtagccggacttcacgttgagggaagccacaccggaggcgttggagtagtacagcgggatggccggaaggtcgttgaggaggatttcctcagcctgctggtacagcttgttggcgtcatcagtgctggaagcggcagcagcctgcttgcacaggtcatcgaaggccgggttcttgtagtcaccatcgttggagccgttgccatcagcagcagcggtggagtacagctgccacaggtagttctcggcgaacgggtagtcaggctgccagccggtacggaaggcgcccttcatctgacggttggtgaccgcgtcacggaattcctggaaggtcgggatcgggttggtggccgcgtcgatgcccaagttgttcttgagctggttcacgacagcatcgtaaatcggcttggcaccaccatcggcgttgtaggagaaggtgagctggccgtcgtacttggagatggcgtcagccttggcccacagttccttggccttggaggcgttgaacttcaggttgtcggcacccttgagggagtcagagtagcccggggtcttcggggaggtgaactcggtggcggcggtggcgttgccgttgagcaccttgtcgatgagctggtcacggttaatggccatggagatggcctgacgacgcagctggccttcctcgtcgttcttgaagtggtcaagggaggacgggatggtgaaggtctggataacggagccggcctcggagtaagcctggaccttcttgtcagtcttgaaggtcttggtgaaggcggccgggacggaatccatcacgtcgaggttgccgccctgaatgtcgcggtaggcggcggagtcgtcggtgtagaccttgaaggtcacaccgtcgttcttgggctgctcgttacccttgtagtcagggttcttgacgagggcgatttccttgttgtggtcccagtggtccagcttgtacgggccattggagacaggcttctcgccgaaggccttcggatccttgtagaaggactcaggcagcggggcaaaggccaggtagccgaccttgatcgggaacacggagtcggactggttcaggtcaacggtgaaggtggtgtcgtccacgaccttgaggccggagagctgctcgtcacccttcagaccatcagcctggagctcatcgtagcccttgatggtggagaagaaggaggagcacttctgggcgttcttgacgttggccacgtaggaccaggccttggtgaaggactcggcggtcaccggggtgccgtcggtgaacttccagccggacttgatcttgatggtgtactgggtggcgtcatcgttcggggtgatggactcggccacttcgttggaagccttgccatccttgtcgaaggagaccagacgggagaacagcaggtcacccggcttgccgccaccggtctcgttggtgttgcccgggatcagcgggttctgcggttcggagttgtacgcagtgatgatgttggagccagcggtgtcaccggaggcagcgttactgttggagccgccgcaggcgctcagcagcatggccacggagcaagccatggcagcgaaagcaagagctttcttcttcatatgatttctcctattcattaggttgcgaagcgtttcagcctcgcctcatgcgaacggggtcggatttcctcatcgtcgggacacttacgcttcccgccgcttcggacacccaaccccgttgctgttacctgtcatttttgcgcacttgggagacaagcagtgtattttttgttacacccatgtaaaattccggggttcttgccggctaggttcagtctttgctgagtttgttaaccaatgtccacatagtggtcatgcccggggaaaggcctgtccgtaacggttcttgagctgctcgatggagacgtgcgtatagcgttgtgtagttttcaaggaggaatgcccgagcatctcctgcacctccctcagatcggcaccgccgtccagcatgtgcgtggcggcggaatgacgcaacgcatgggggctgatgtccggtacgccggcctctcgggccgctctgtgtacgatgtcacgggctatgcgttggtcgatacggccgcctcgtgcgccgaggaacagggcgttggtagcacgggacttggctgcatccgttgccgtacgggccagtacaggccgcccttgttcaagccaagtctccagcgcacgctgggcgggtagtccgaacggcaccacgcgttgcttgttgcctttgccggtgactttgatggtgcgattggagaagtcgatgtcggcgatatccatcgacaccagttcggcgacacggatgccggtggcatacagtagttcgagaatcgcggcgttgcgctgcgattcggcgacgactcgggcgctgtcgcgcttgtctgcacgggcgggtgcctcgttgcggtttacggtgtcggctgacttatcagctgtcttgccgctgccactgccggacgcggctgccgctcccccatcgtccttgtactggtttgctgcaacggcatgttcagcgacatccaataattgctcggcctgggattcggtgagcaccgcgggcagcgtgctgggaatcgagggagtcatcagtgtggcggccgggtcggtggtggtcagcccatgctcataggcccacgcgaagaacccgcgcacggccacggttttgcgggccatgctgctgcgggcgtgatcgcgcgattccaccgccatccagctgcgcagatcatccagcgtgatctcgttcagatcggtcacgccgcgcagctcgaacaggtgcaggcatgccgtgagatccgcgcgatacgctttgagcgtattcgctgacaggccgcggttggacttcagataggagacgaaggagtcgatatcgccgtcgaactgcgtagatgacactctcgttctcctccgaattctttatggccttgggttacggccggggtggcgtgttacgccgctccggcacgggtttcaatgtggcaatctgttcctgatggatggtcacgttctgggccgggcgcgaaccattggcggcggcgtcacgcaccatctccaacgtgtatccatcccaggaaaccacatgccccacatagtcgcggaacttcatacggtggtcgaccgggtcaatgccgtcggtgatgcgcaccaccacgcgggcaccggccggaatctgccttggtaacgtcatacgtcatcatccccttaaccatccaccgcatcaacttcgatgcgtttcccgaaaaacggtacagactaccttactcctttgggtctttcgaacagcggagccacacggtcttctcacgaaaacaagcgggaacttcatccccctcgcgtagccttcttcgtgacgggcggcgaggggaacctgcacacgggctacatggcggggcgcagttacatggcggggcgcagttggacgatggcctgacgcggatggatgaaaccggtgatggcttctccccggcgtgcggagaacagcaaggtctgctgccagccggcttcggggacggcgagctcgcgttccgggaatccggcggcagttgtgccggcttgctgcggcggtggccgtaccagcttgtgcagcggtgatgccggctcgcgtcacggcggccttgtaccggcggaaggggtcgccttcggcgaagaatcccatcacatcctgctcgccgtcggcaccagcgtgcagttggtcggccatatcggtcagacgtgccgccatgcggcgcagcagcacttcgacgttcagcgagtcttcctcgaccatcgcgcgcgtgcggtccgggtcggtcagggacacgcgggtcatgtccctccagcagccggcggccagcgcggcggcgatgttgcggtccgggttggcgaccagttcgttgatcagcgcggtggacaccacatgcggcatgtgggagatcatcgccgcggccttgtcatgcgtttcgtcgtccacgacgatgacgcggttgccgacgtccttggtgatcatcgcggcgacgtcgaggaagcggcggtagtccgtggactcgtccacggtgatggcccatagggcaccgtcgtacagatgcgggtcggcggcctgccagccggacagttcgttgccggccatcggatgggcgccgacgtagcacttccccagcccggcagccttgacctgatcgcggaccatgcccttgaccgagcccacgtcggtgagcgtggtgttcggatggtcgcccatgagcggggccagggcggcgaggattgcgggcatcgccttgagcggattgcacagcacgaccacatccggctcggcatccatgagttcggagagcgtgctcttgcagaaaatgccatcggcttcggcctgggcgtaggggtgcgggcgatggttccacgcgacgacgcgcacgccgcgctcggtcaggcggcgtgcgagcgagccgccgatcaatccgagtccgacgattccgactgtatctaccacagcagttccttccttgcttcctcggtgtactgccagccttccggcgcgcgattggtgatgtggacgccgccctcgggcagcatccaggcgtcgaccggcgggttcgggcgttcgcggcgtgggtagacggccagggtttttgcccagtcgccgtgtccggcgatctcttccagtgcggtgcggaatctcggctcccagggggcggcgtcaagggtggcgatgaagctgtaggttccgtcgtggcctttgatcgggcgcgagatgaagctggtcatgttcagtcccgcatcgcgcaggacgtccagcaggtcggcgagtacgccggggccggtgaccagcgggatgaaggtgatgatggtttcgaagtcgccggcgtcattgctgtgggcgcgggcgttgagttcctggaccacatcacgcggggcgatgacaaggaattcggtgtgcgcgccatcgaaatcctgcacatgttcggcgagggtgtcgagatcgtagagttcgccgcagatgctggggccgagcgccacgcggccgggcttcaggtcgcggcaggcggcggcgttggaggatgcgggttcgggctgcaaatggtgttcggcgatgaaccgggtgcattgggccagaccgtgcgggtgggcgctgacggggttgccggtgcagtcgtagatgctgtggccgcgcacggtgaaggcgttgaaggccacgtccacactgatccgggcgaagccggccgcgttgggggcgtcgatcagcgcgtcgagattcgggaccacatagccttcgacgttgttttcccatgcgatgacgccccagccttggcgcgactgtacggcctgcatgatcgcgggcacgtcgggcagagcgatgaggtcgaagtcgccgagtgtggcgaactggtcggcggccgtcattgccgcctgatgggtgaaggtgccctccgggcccaagtaaaacagtttcatgcgtgccataatgttctatggtagcggccgtaatcccctacgcccgccgatacgcgacgcattcccgggaatgtatcgccatatatagttacgcgcgcgattcagaatgagtgggaatgacgaaccagcgggcgggaagaatgagcaggacgacttggaccagtatcaggccgtacagccagatgtagccggcatgttgggagaagaacggcatgtcgccttggaatccggcgacgatgagcgctttgccggatgtggtggtcagcgccatgccccatgcggtcagtgaggaggcgatgaggtgcagggccagtccgaccgcgcccatgcgcgaacgggcgcaccatgtcgataggccgatcagcagaaacgccagcaccagaccatacggaatattcagttccgcacccatacggtgggcgaacgtgcccacaaaggcggaagccacgcccgccgcaatcgtgatcaacgatttgaccagcgcgttctggcgatacgaccacggacgcaattcagtagtgctcttcacagtcatgcgtttcagtataggtggggatatgacttggtgaggaataaacttagctcccctcagagaggggagctagagagaatggtcggctacagccgcaccaaatcacttaccctgctgggcggcgttctggcggcgctgcttggcgcgccacttgtaccagtcctcacggccgaggatgatcttgcgcacgcggatggactccggggtgacttccacgcactcgtcctcgttggcgaagtccagggactcctcaaggctcatcttgatcggcggggtcagggtttcgagcacgtcagcggtggaggaacgcatgttggtcatgtgcttggccagcgtgatgttcacgtccagctcgtcgggcttgttgttcatacccacgacctggccttcatacaccggggactgcggttcgacgaagaagttgccacgggcctgcagacgctgcatggcgtacggggtggcgatacccttgcgatcggaaaccatggaaccgttctggcgaatggtgatggcgccagcccacggcgcgtagccggcagagatggaggaggagatgccggtgccacgagtggcggaaagcagcgcggtgcggaagccgatcagaccacgggacggcacggtgaactgcagacggacccagccggagccgtggttggtcatgccatccatacggcccttacggtcggccatgagctgggtgacggtacccatgtactcttccggcacgtcgatggtggtgttttccatcggctcgttgatcacgccgtcgatcttcttggtgaccacctgcggacggccgacggtcagctcgtagccttcgcggcgcatctgctcggcaagcacggccagcgccagctcgccacggccctggacttcccaagcgtcgggacggtcggtgggcagcaccttgatggacacgttaccgatgagctcgcggtccagacggtccttgatcatgcgggcggtgagcttgtggtccttgccctcggtgccggccagcggggagtcgttggtgccgaaggtcatggagatggccggatcgtccacatggatgagcggcagcggcttcgggtcgttggggtcgacgatggtctcgccgatcatgatgtcgttaacgccggcaacggccacgatgtcgccggggcctgcggattcgaccgggatacgctcgaggccctgggtgcgcagcagttcggagacgcggaagttctcgagggagccgtccacacgggacaggccgtaggtcttgcccttctcaagggtgccgttgtagatacggaccagaccgagtcggccgaggaagtcggaggagtcgatgttggccacgtgagcctgcagcggggcgccctcctcgtattcgggggccgggatggtggagatgatggtttcgaacagcggctcgaggttgtcgttgtccggcaggccaccgtcggcgggctggttcacggaggcgtagccggccttggcggcgcagtagatgaccggcatttcaagcagctggtcaaggtccaggtcgatgccctcgtgctgcacgtcgtcggccaggccgagcagcaggtcggaggtttcgccgacgacctcttcgatacgggcgtcggggcggtcgaccttgttcacgcacaggatgaccggcagcttggcttcgagggccttgcgcagcacgaagcgggtctgcggcagcgggccttcggaggcgtccacgagcagcacgacgccgtcaaccatggagatgccgcgctcgacctcgccgccgaaatcggcgtggccgggggtgtcgatgatgttgagggtgatgccctccgggtggccgtacttggcggccagcggaccggtgtattccacggccgtgttcttggcgaggatggtgatgcccttctcgcgttccagatcgttggaatccattacacgatccggcacttcctcacgctcggaaaacacgtgcgactgctgaagcatggcattgaccagggtggtcttgccgtgatcgacgtgagccacaatcgccacattacggatatctccacgaaccgccatcgaaacctctcttaatactgattcttttgcgtaatcgttcggtacttgcgttctcgagtacttaagtacttactctgaggtgtttattcatacctacacacaaaccgtcacgatggtactcgcacaccttgactatgtcggaacatagaaaagcacctcacaacggcagaactcccgcgtctcgacgaacccctcgcgggatttctgccgtttttacggccttcaaacggcagaacccccgcgtccctttcgccgggacgcgggggttctgccggtaatcaggcaaatatctgttctcccgtcatcgacttccgtcagtcttcgagatcgaggcctttgcgttcgggcaggcagagggcggcgacgcaggcgatgatgaaggcggcggcgaagatgatgaaggccacggccttgttgccgccggacagggtcaggaaccacggcatgaggagcggcgcgatgatggcggcgatgcggcccaccgctgcggcggcaccggcggccgcgccacgcaggcgggtcgggtagatttccggggtcacggcgtacagcacgccccacgcaccgaggttggaggcggacagcagcatgccgaacacgagcacgagggccacagatccggcctgcgagaacgcgaaggcggccacggcggagacggccaggaagatgctcagcgtcttgcggcggccccagacctccaccagccaggcggctaggaagtaaccgggcagctgggcgatggagatggcgagcgtgtagccgaatgacttggtcagggagccgaactggtcggcgagcagcgacggcatccatgtgaacgcgccgtagtaggagaagttcacgaagaaccacgtggcccagatggcgatggtgcgggccaggtacttggagccgaacagttcgcgcgtcttgatcttcggcagcggcttgcccttgggagaggttaccggggctactcccccggcttcctcgaagtagcgcacggccttttcggcttcgtcttcgcgacccttggcttcgaggaatcgcacggattctgggatgtgcacgcgggtgacgattgcgtagagcagtggcagcgcgccgatggccagcgcccagcgccagccccagtcgccggtgttcgggatcacgaagtagccgatcatggcggcgacgatccagccgacggcccagaacgattccagcagcacagtcatgcggccgcgctgtttggtcggcgaaaactcggagaccagcgtggaggcgaccggcagttccgcgcccaagcccagtccgatgatcagtcgggcgccgagcagcatgccgagtgaccaagatagggccatggcaccgttggcgatgccgaagataatcagtgtggcggtgaacacggttttgcggcccacgcggtcggcgatgaagccgcccactgccgcgccgatggccatgccgacgaagccgatggacagcacccatgacttttcggtcggggtgaggttgaagtgcgggtcggcggcgatggcggcgactacgaaggagacgaggccgacgtccatggcgtcgaatgcccagccgatgccggaggcgacgaggagtttgcggtgcgccttgttgaagggcagccggtcgaggcgctcgttgcgggtgagctgcgcgggttgcgctgaagtggtggtgctcacgtcgtttcctttctggtaagtggcgtcagatttaatggcgggtcaggtcggtgtaggactcttcgatggccaagctgatgcgttcgacttgttcgcgggtcagcggcttgcggaaggtcatgcgtaatgccgatttggcgatggacggttcgaggcccatcgccagcaacgtggcaggaatctcgtggcgcccgatggcgcaggccgagccggatgaggcagcgatgccgcgcgcgtccaggtcgacgagcagcgcttccccggtgacgccggggaagatgaaggaggcgtgaccgggcagacggcgttcggggtcgccggtcaggtcggcgcgaggcgcgacccggcgaaccgcgtcgatgagcatgtctcgggacgcgaccaactcacggtactgcgcctgcatgcgcgcattcgattcgttgagtccgatggcgagcgccacggcaccggccacgttctgcgtgccagagcgcaggccgcgttcctgcccgcctccggacagcaccggttcgatgggtgtgcggccgcgtaccagcagcgctcccagacctttgggggtgccgaatttgtgtccggatacggacagggcgtccacatcccagtcacgaaaacgaatcggaatctgcccggcggcctgtacggcgtctacatggatgggcacgccgtgcgcgtgggcgatgcggaccagttcctccacgggttccacggtgccgacctcgttgttggccagcatggtggagaccatcgtggtacgttcactggcctcgccgtcgagctcgcgttcaagtgcgtcgagatcgagatgtgcttgcgcatccacgggaatgcgcacgacttcgaaaccgaaccattcgtgcagccatgccgccgattgggccacggccgggtgctcgatagcggaaatgataatgcgcgggcgacaatttgccggctgtttgccatcggcttcggcgaatccgcagaccggccgcaagcccagtttgcgcatgcgcgccatggcgatgcctttgatggccagattgtccgattcggtgccgcctgaggtgaagatcacgtcatccggccgggcgcccaatgccgcggcaaatgatgcgcgagccgcgtccagcgcgcgggccgcggttttgccgggctggtgcacgctggccggattggcgtaggcctcagtcaggaacggggtcatggcctcgatgactgccgggctcactgattcggtggcggcggcgtccaggtacagttcgccgggttcaccggatgcgttgggggtatcggccatgactagttccaatccaatccgaggtcgatgctgcgcacagagtgggtgagcgcgcccacggagatcacgtccacgccggtgacggccacggctggcactcgctccaggctcatgttgccgctggcttccacgatggccttaccgtcgatgagctccacgccgcgacgggtgtcgtcgagcgagaaattgtccagcatgatggtgtccgctccgccggcgagcacggcgggaatctggtcaaggcggtcgacttccacttcgatatgcgtggtgtggcccacctgttcgcgcacgtggcggatcgcgccggccaggtcgatgccgcgcgcggcgagcgccgccagatggttgtccttcatcatgaccgcgtcggacagtccgtaacgatggttgtggccgccgccgcagaccacggcgtatttctcgaacgggcgcaggccgggcgtggttttgcgcgtatcgacgatgcgggtgcgctcgtagcggcgcggccgggtgacgggtccgtcataatcatcgccgtagatggcgttcaccgcgtccacgaaggcggcggtcatggtggcgatgccgctcatgcgctgagtgaagttgagggcgatgcgctcggcggtgagcaggtcgcgtaccgggcctttcacggtggcgagtatctggccgcgctggaatcgctcgccgtccttgatggcggcggtgacggtgacggccgggttctgtgcggcgaaggctgcggcgaacacgtcgatgccgctcatcacgccgttttcgcgcgcggtgaggtgggccgagccggtttcgtccgcggggatggtggtctcgcaggtgatgtcgccgtagggcgcgtcttcggcgagcgccgcttcgacggcgacgcggatgatgtgtgatgtgagcatgggtcagtccttgatgtaggcgacggagtgggcccagttgtcgactggctcgctgtggtcggtgcgggcgtgggcgcctctcgactcggtgcgggcgagcgcggcggtggcggccacatagcctacggtgagcatgttgcggttctccaaagcctcaacgctgcttgcagcaccatcggcgtttacatcagcctgggcgtttgcggcggcgaggccttggccgagttcggcgatggcggttttcagtccggcctcgtcgcgcagcacgccgacgccatgccacatggtgttctggatgcgggtacgattccacaccttgtcggcggcggtatcgtcagcagcagccgtagcggcaggggcggccagcgcgatcggcgcatggtcgaacacggcaccggtggcggagttcaggaacggttcgggtgcccagaccgcgtcgtcaccgtccgcgacggcggccagaccggcgcggcgtccgtagacgagcccctcgagcagcgagttggaggcaagacggttggagcccatgacaccggtacgagcgcattcgccggccgcatacaggccgggaatggaggtccgggcgttcagatcggtgcgaatgcctcccatgtagtagtgcgcggcgggcgccaccggaatcggctccttgctccagtcgaagccaagcgaacgcgtataggcgtcgatggtcgggaatcggtgggccaagaagctggccaggtcggggttctcgcgggccatcggcgagacgtcgagcatcacgggcttgccgccttgcgcctgcatcacgcggaagttctcgcgggccacgacgtcacgcggcgcgagttcggcgcgcggatcgatgtccttcatatacctgtggccatgctcatccagcagcaccgcaccttcgccgcgcacggcttcggagacgaggaagtgctcgcccacggccatggcggtgggatggaactggtagaactccagatcggcgacctgggcaccggcacgccatgcgacggcgaggccgtccgcggtggcgaccggcggattggtggtgtacgggtacatacggcctgctccaccggcggccaagatcacccggtcggcggccagatccttgtcctgcccgtcgatcagcaggtggacgccggcgatgtggccgccccgcacgatgagatctttgaggaaggcgttctcgatgatgtggatgcgcgggttcttgcgcaccatggcggagacgtccagttcaagcactttgccggtggcgtctcccccggcatgcaccacgcgggcgcgcgaatgagccgcttccaggccgcgcagcatgtgtccatgcgcgtcgcggtcgaagtggacgccggccgcggcgaactcgcggacgcgctccgcaccctcacgggtgaggatgtccacggccttcgggtcgcacaggccgtggcccgcggccatggtgtcggcggcatgcagcttcgggtcgtcgtcggagaagatggctgcagcgatgccgccctgcgcatgataggtgtttgattccaccagttcggccttggttaccaaggtcacgtcgtgtccggtgccggccacggccagtgccgcggacagtccggcgacgccggcgcccacgacgacgatttcagtgttgctcattgtgttgctttcctctgtttttgcgtcatctgctcccttcagtccgctacgcggacagctcccctcatgtacgaggagcgccagggacgaatcacgggtgaacgcgcagcatgcgctccagtgccaccttggcttcgcgggcggtgtcttcgtccacggtgatgcgattgaccacgttgccggcttcgaggttctccaaagcccaagccaggtaggccgggtggatgcggtacatcgtggagcaggggcagaccacggggtccaagcagaacacggtcttgtccgggtactgcgcggccagacggttcaccaggttgatttcggtgcccacagcaatggcggatccggcgggcgcgttggcgatctccttgacgatgtacgcggtggagccagtaccgtcggcggcatcgaccacctgcatcgagcactcggggtgcacgatcaccttgacgcccgggtatgccttgcgggcacgttcgacctgttcgacggtgaaacgctggtgcacggagcagaagcccttccacagaatcatcttggcgcgggcgtaatcggccggatcggcggcgccgccctgtgccttgaacggatcccacagcggcatctcgctcagcggaatgcccatcgcgcgggcggtattgcggcccagatgctggtccgggaagaacagcacgcgcttgccgcgggcgaacgcccattccagcacggcgtgcgcattggaagaggtgcatacgatgccgccgttgcgtccgcagaacgccttcagcgcggcggatgagttcatgtaggtgaccggaatgatctgctgcaagccatcggagtccggctgggtgccgcagatctcgccgagctggtcccagcattcctggacctggtcgatgttggccatatcggccatcgagcagccggcggacaggttgggcagggtcacgctctgttcgggcgtggagaggatgtcggcggtttcggccatgaagtgcacgccgcagaacacgatgtggtcggcgtccgggcgttcggtggcgttcttggccagctggaaggagtcgcccacgaaatcggcgtgcttgatgatctcgtcacgctggtagaagtggcccagaatcaacagtttggagccgagacgctgcttggcgtcggagatgcgctgctgcagttcctcgtcggaggccttgcggtattcgtccggcaacacctgctggcgcggcgcgttggcgggcagacggtcgagcatcgaggcaccgggaccgtagctgggtgtggtggtgtcgaagtgccatgggtcctgggtcagtcctgcatcgcaggtgctttgcgcgcccagcttggcgatgatctcgtcaacggacggcgcagtgaatagtgcggtcatagtggttcctttcctatatacgtctgtgataccggcccgaagcgggtcggcgggaaaaatcagatgcgcgcggatgggatcagcgcgtcgagagcgtcttcacgctcgccttgtctggacagttccacgatgtcgtcaccatcggattcgtggggcgtaccgttctcgacaggtcgtttggggatgtagcggtagacggtggccggtcgttggcggccttcgcgcatcttctccccggtgtcttcaaggtcgcccgaggcaagcattttgcggcggaagttcgccaagtcgaggggttcgccgccaatcgcctcatagacgccgtgcagttggcgcagggtgaacgtggggccgagcagtcgggtggccacgtcggagtattcgattttggagcgcaggcggagcagcgcgtagtcgatgatctggcgatggtcgaacgccagctcgggcagttcgtcttcggggaaccatcgtacgttgtcaccgtcctcgaagcccgcggcctcggtctggccgacgagcgcccagtacacgacggataccatgggcaatccgccatgggaccgggtcgggcctccaaaggtgtacagctgttcgaggtatcgcgggtgcaggtctgtggtcgattcgagggccgcgtaggcagactgttccaacgaccggtcggagcgcaggtcaccgccgggcaacgcccagcagcccaggaacggctgacggacgcgcttgaccaggggcaaccagagacgggaatgggccgagttcgcggcgttgccggaatcggcggcactgttgccggtatcgtcttccgggccgagtgccagaatcaccactgacacgccgacctgtggcggtgcgctgcggcgctcggacacattgccgaatcccatgccatgcctctttccataccggttgttctccctgcattgagagcatagcactacttatagtcacaatgaccataaatcacatatcggatggtctagcgcacgaatattggtcaggcagcgggccccaatcgctacgaaatcacgtccgtatcttccgatttcgactgtgtcatttcggcgacggacgggaggaatggcgctagggagggtagttcgtcgagactcttcagacccatttggtcgaggaagaattcggaggtgaccaagagggccgcgcgggattcggggtccacgccgtcttccttgataaggccgcgtaccgtgagcgagcgaatcactccatcggagttgacaccgcggatcgcggccacttgggctcgggtgacgggttggcgataggccacgatggcaagcgcctccagtgcggcctgactgagtctcgcagtctggccgtcggtgacgaatgatgagacgaccggctcgaacgcggcgcgactggcgaactgccagccacgagcggtgcggcgcagttcgaagccgcgcgggcggatgtcacgggattcatcgccctcatagtaatcgtgcagggctcgcaatgcctcttcgactgtgttgcgatccaatgccaaaatacgggccagctcggtggcggtctgcggctggtcggcgaccatcagaatcgcttccagacaggcgggcagcccgccgggaaaatcgtctaccgcgaaatccacgtattcggggtgagtctcctccactcccctcaccgcggcctttgcggattcagccgtcgattcggcatccgccatgtgttcggttgtattcgttgcgtcaatctgttcagtcaccaatcgccgtccttacgcaaaatcaccttcggaaatgttcacgtcgctcatcgtttcggctacgccgggtacccacctcaggtgcagttcggcaaacggaccatcttgctgatactgcagcacaccttgtttgaagaacacgagcacggccatgaaccgagccaccacctcaatacgagaagtgcagtcccgggtcaattcgctgaacgatatcgactggtcgcccttggattccaatgccgcgatcagccggtcgcgcaccaccagcgattgggcccgcagatcgaccaacggcacgtgcagctgatggatcgacacttcggaggcgggcgcgttggcgatgacctgggcggtcagtcgggcgagttcgagcggagtcagcgtccataccagctcaggcagcatggcggcaacgccctcgtccatggccgccgggtgcgggaatcggccggagttggcggcgatacgcgcccggaagtcacctgcggcctgcttgtaggcgcggtattggaggagtcgggcgaacagcaaatcgcgttcgcgcagcacttcgaggctctgctcgtcgtgctggctgtcttcgccgccgggcagaatcgccacgcttttggcctcgaccagaatagaggcgatatcgagaaaggcgctggcctcatccatgttttttgtgaaatcgagcccgcgcacgtatgtcaggaattcctcggtgatcgaggagagggaaacttcggtcagctcgagtctgttgttggcgatcatgccgagcaaggcatcaaacggaccggaatagacttcgaggttgacccggaagccggaagtggcggattcctccgtgctgatttcggcttccgcggagctcccctcagcctcgctacgcgagccagcttccctcagagaggggagccgagaaagggaagtctcattcatcgtttatcgaaacaatcgttacgccacgatgccgcgagcaatgagctcacgtgccacctcacggtattcctttgatgtcttgtgctcaggggcatagaccaccacgggcgcggcggcaaccgtggaatcgggcagtttgatggagcgggagatgaacgtgtggaacaccttttcgctgaacgcctcgtaaacgcgctggcagacctcttcgcagtgcagtgtcttggtgtacatggtgatgagcacgccatccacttccaatgcgggattgatgcgggactgcactttttcgatggactgcataagcagggccacaccgcgcaaggcgaagaattcggcggccacgggaatgatcacgccatcagctgcggcaagcgcgttcacggtgagcaggccgagcgatggctggcagtcgacgatgatgagatcgtattccgacttgagcttgcgcagcacgctgttcaggatctgctctcggcccacttcggtgaccagctggacctcggcggcggacaaatcgatgttcgccggaatcacatcgatgttctcgaatgcggtgtgctgcaccacatcatgtgggtccacggaaatatcgaacagcgcggtgtaaatcgtgttctccacggtattcgcgttgacgcccagtcccacagtggcggcaccctgcggatcgaaatcgacgataagcacgcggcggccatactgggccaacgcaccggcgatattgatggagctggtggtcttacctacgccacccttctggttgcacatggcaatgacacgcgccggaccgtgctgttgcagcggttcgggtgcggggaaggtttcgtattcacgtccaagcaaatcggtaggcatactgtctaccttatcaacatccgggttcgctgggggtgcaacgacatacgttcctgtcataggcagcgttccttgacggaatgcgctgtctttatcgcgggtatctcgccagtcgtccatcgttgccctcgccccctttgctgggaatacctgctcgcccatcctaatgtactcgccgggctcgcctcggaacaccgttttgccgctggtattccagtgttccgaggtttatggatctcgtctcgtactatgtcgatgcgcttactcggtgcgcagtgcggtggccgggtcttgcttggctgccttacgcgagggaatcaggccgccgatcagcgtgagcaccacgcttaggatcaccagcaccacgccaccggtcaccggcagggcggcattgacgtccgcattgccgatgaagtggcgtagcacggcgttgatcggaatattgagcagcacggtcaagcccacgcccaacaggccggagcataggccgatgatgccggtctccgcattgaacacctgggatacgttgtgcttcgaggcacccattgcgcgtaggatgccgatttccttggtgcgctccagcaccgaaatgtaggtgatgatgccgatcatgatcgaggagacgatcagcgagacggacacgaacgcgataagcacgtaggaaatcacgttgacgatggtggtcaccgaactcatcatgagcccaacgtaatccgtgtaggtgatcttgtctttcttcgagacggtgttgttgtagtcggtgatcgcgtcggcgatgtggtctttgtcttcgaagctgtcggcgtagatgttgatcgagctgggcgcgtcacgactcaccacaccgaatgcggcgaggttgtcgtcgtaggtgccggtcgacacgtactggtcgtagatcgcgacaagcacgtcgttcgaagccgtggcgatatacgcgtcgaaactgtcggcgagctgctgttcgctcatcgcggccatggcggcggcctgatcgccggcacccgccgcgccagcgacacctgcagcaccagcaccagcggcgtccgatgcgcccgtgccggactgctgcccggcgctcatcatcgacttggccatgttcgccttctgcgtcacgcccagcgaagccacgtaggtgcgcgcgtcggacaccttggtggcatcgtccgagggcgagaacgtcatgccgttgagcacgttcgtgttcgggttggccttctgatcggtaacgatggcgctggaggccgcacggtcgatcaaatcattggtcagagcgcgcgcgtaccccacaccagcggccaacggcgtggccgaagcatccttcttcgccttgacgacgcccaccaccttgagtttggtggccgtttcgaggcgctgttcgatttcgtccttgtcgttgccgatgaaacggtagtggccgtcatcgcccttgacgtactggtcggatgccggaatcatgtacagcgtctgatcgagggccttagcatagtcgatcttgtcttgtggagtgctgaccttgtcgccggcgttgagcttggacatcatctcgtggtaatcggaggcgggcagcaggccgagctcgtacagcgtggtcagcggcacgctgttgttgtcgtcaagcaccagcaccacttcatccttggacttcggccatgaaccgttgaccacctggtagttgtcggtgataaccttgcctacgagcttgctgtcgtccgctcccggcatgatctcgttgaacgagtcgggcgcggcgttctcatcggttttgccggtcagcatcgacatctgctgcgaggtgatcgacgaggtgccggacatgccggacgagcttgtggacgccatctgcgaggccatcgaggcagagtcgctggatccgatcgtcacgccgtccgcattgaccagcgtgccgtcggggtcgtggtcgaacacggagaatttcacgtcatatgtgtactggatgccggtggaacccacatactggtgaatctcgctcttggaattatccaggtatttcttgaagcgggtcaggttgttttcggtaatcgaactggtcaggctggacgcctgcttgacgctgcggtcgtccgggtagatgccgtcggttttgtgcgtcttgccgccgtatccgtcatcgccgcccatctgtccgcccatcatgctgctcaggtcgaaggtctgggagtcgacggtgatcgggtaggcggtcatcgtgtcacgctggatgtcactgatgtatgtgttcacgccagtcgacaccgatagaatcagcgcgatgccgatgatgccgatcgagccggcgaacgaggtcagcagggtgcgcgccttcttggtcttcagattgttgaagctcaacgccagcgacgtggcgaacgacatcgacgcgcggcccatcgtcttgtacacggccggctgttcggccgtctcgtccacgacgaacgggtcggagtcggagcggatcacgccgtcgcgcaggttgacgatgcgcgtggcatattgttccgcaagttcggggttgtgggtgaccatgaccacgaggcggtccttggccacgtccttgagcaggttcatgatctgcacggacgtgtccgaatcgagcgcgccggtcggctcgtcggccaggacgatgtccgggtcgttgaccagtgcgcgggcgatcgccacgcgctgcatctggccgccggacagctggtttggcttcttgttgatgtgttcgccgagtccgaccttctccagcgccttgcgcgcacgttcgcgacggtcggccttgccgatgccggaaatcgtcagcgcgagttcgacattcgacagaatcgtctggtgagggatcagattgtagctctggaacacgaagccgatggtgtggttgcggtacgaatcccaatcgcgatccttgtattggcgcgtcgagatgccgttgatcaccaaatcgccgtcgtcataccggtcgaggccgccgatgatgttgagcaaggtggtcttgccggaacccgagggacccagaatcgcgacgaattcgctgtcgcgtaggttcaggctgactttgtcaagcgcctgctgaacgaaatcaccggttttatagcgcttcgagatcgatttgatctgcagcatgaatacctcttcctggctgacggttcgctgttatgtactgtattgtcacgccttgaatttccggccgactttggtgctcccccgccgcgattccgctatgggcggacgcgtcgcaaaatggtgtgtctcaccgcgctctgggatgtgaggtcagatacgtttcgatcagggtttcagggcttacgtgcgtgtagatctgcgtggtggtcacgctggcgtgcccgagcagttcctgcacggtgcgcacgtccgcgccgccttggatcaggtgcgtggcaaaggaatggcgcaaggtgtgcggatggagtggtttggtgatgccggcccgctccccggttgctttgacgatttcccataccgattgccgcgagatgcgcttgccgcgtttgttgagaaacagtgcgcgcctctcgggaatcttggcgctggagcgctgttccaactcgccacgccccgcattgaggtatgcggtgatggcccggcatgcgtaactgcccaatggcacaagccgctgcttggagcccttgcccatgagtcgcgcgatgtgctcgtccaggtcgatgtcgtccagattcgcaccggtggcttccgagacgcggcagccggtggcgtacatgaattcgagcagggccttgtcccgtaataccaccggatcggttgagccgccgactgccgccgcgtcgagcagacgggttacctcgtccacggtgagtacgtcgggcagggtgctggcgcctttgggcgccttgactgcggccgaaacatccgccgtcaccgcgtgctgaccgagcgcgaaacggtggaattcgtggatcgaggccagtcttcgggctttggagcgggcggactcccccgcctggtcaagggcggcgatgtagtcttcgacgtcttgtttggttatggcgtccggttcgtggatgccgcgggtttcgagccaatcaatgtatttggcgatgtcggattcgtaggcggtgacggtggccgtggcgagccctcgctccacgccgatgtggacgaggaactgctcggtgagtctggtgaatccgttggtcatagtgcccatggtacaaagaaaccccgctcggaagcggggtttctagtgtgaagtcacgacttcaagcaatcaggcctcaaccggagcgttgacgtcctcaggcagggcggccttggcggcgtccacgatggtcttgaaggtgtccgggtcggagacggcgatctcagccagagcgcgacgatccagctcgatgccggcgagacgcaggccctggatgaagcggttgtaggtgatgccctcagcgcggacggcagcattgatgcgctggatccacagcttgcggaagtcgcccttgcgagccttgcggtcacggaagttgtagttaaaggagtgcagcagctgttccttggccttgcggtacaggcgggagcgctggccacggtagccggaagccctctcgagaacaacgcgacgcttcttgtgggcgttcactgcgcgcttgacacgtgccataatctattcctcagctttctaaagtcttgttatttccgggtaagccctatgctcacttctgcagaagctggtgcagcttcttggcctggccgccgcgcagcacatcgtcggcggacagttcacggcgcttgcgagcggacttgtgctcgaggttgtggcgcatggcggaaccgacatgcttcaccttgccggtgccggtgatcttggcgcgcttggaagcggcggaattagttttcatcttcggcattgctgccctccttgctggtttgcttcttgtcggaagtcttctgagaaatcgcggactgcgcgtcggccgcggcctgagcctgagactcctgcttggccgcgagacgagccgcctggcgagcctgacgctcggcgcgggactcggcgccacgacgacgctgctcggactgggtgtgcaccttcttgcccttcggcgcaagggtcatgatgatgttgcggccctcctgcttcggcttggactcgacggtgccgtattcctcgacatcgtcggccagacgctgcagcagttccacgccaccaatcgggcgggagatctcacgaccgcgcaacatgatggtgaccttgaccttgtcgcctccgttaaggaagcgggtcacatggcccttcttcacgtcgaaatcgtggtcgtcaatcttcaggcggaaacgaatctccttgatttccgcggtgctctggttgcggcgagcttcacgagccttgatcttctcgttgtacttgaacttgccgtaatcaatgagcttggcgaccggaggcttcgcgttcggggccacctcgacgagatcgaggtttgcctccttggccaggttcagcgcgacggaagtcgcgatgacgcccacctgctcgcccttcgggccgatcaggcgtacctgcgggacgcgaatctcgtcgttaatacgtggttcgtcgctgatgatgactccaatcctctacttcaattccgtggcgagggcctttgctggagtcctgttcaatgctttgggttcatggcaagccaaagcccgcgccaatatgcgctcagcttccgcagacgcatatcagttctttgcgtcattcctgattacgcgttgtatatcgcaatcgctaggctgtttgccttgaacccgaggccttgaaaggcttccaggtggggttgccccgctttcttgatttctcaagccaaatagaaagtctaccatacgcccggacattcgcggtccgtgtgtcgaacctactgcacggcgcgcagcagaccgccgaagccttcgtctttgagaatctgccgatatgggccggcctcatcggcgatgatttgatcgatggcatgcatgccgagtacttcgaccggcgccttgtcgtcggtgagaatagtcgacgctgagtccggttcgttcaccttccggaatcgagaggcgacctcttccatataccattcgagatcttcgctgccggtgcgctcgtaggtggtctcacgcaggttgagcgccttggaggcctgctgcatggagttctcttcggagccggaacccggcttcttggcgaacagttcacggttcgtggtgttcggcacgtcggccgtcagtgtgttcccattgccgaacacgctggcgatggtatcgctcaacgcctcgttgatcgaaccttggccgtccgagatcatgttcatgttcaccaccatcacgccgccggggttcaggtgctctctgaccatggtgaagaactcggtggagctcatctggaagggaatggtgatgtcctgatacgcatcgaccatgatcacgtcgtacttgtcatgcgaggcggcgagccaggctcggccgtcatacgtggtcacggggatgtcggcgggctcatcgaagtattcgccggccagatcggtgatcttctggtcaatctccacgccggtgatgttcattttcggataatactgcttcagctggcgggcgtaggtgccggtgcccatgccgaggatcagcgcggaattggcattgtcggcgagcgccggcgcagccagggccgtgtcgtagtacatacctgtcagtcctttgtctttcatcgtgacggactgcacgccgaacagcacgttggtggacaggatcgtgcggtcggagaggttcttgacctgcaggtagttgtagatggactcgccctcataggccaggttggtttcccagaacgcgaagccggtcaggggcgagacgcaggacgtggccacgaagatcacggcgctgaccacgcaggcgatgcgcttggccttgatcgagatgaagtagatcagcggacatgccggagaagaattcggtgatgtagaggaatatctttgatttgagaatcggccgttcgcttgcctcggtgatctgtgccatcgctccgctcccctgcctgtgcgcctatcgactactgttctgatgcgtagcctatcagcattttcccggccgatgggtggataccggctacagtaggcatcatgactcaggtatgcgtgatttttggtgcgggcgaatactatgcgggcacgcccgtggtgccggccggcgcgtatgtgattgcggccgatggcgggctcgaccatacgcgccagttgggtatcgtgcccgatgtggtggtgggcgacttcgattcgctggagggccggccgccccgcaccgatgtgcgcaccatcgcgctgcccgcgctgaaggacgatccggacatgctctccgcgctgaaggtcggttggtcggcgggttgccgcgaattccatgtctatggcggtttgggcggccgcattgaccatacgatttccggcattcaactgatggcattattggcccggcatggggcaagcgggtatctgtatggtgatgggctcatcgtcacggccatcaccgatggtaggctttcgttccccgcgcatccggtgcccgaggacggccgcatggtgtctgcgttctcccactccgatgtttcgcttggcgtgaacgagccggggctgaaatatgagcttaaagacggcacgctgaccaatacggtggtgcagggggtaagcaacgagttccgcgacggcgtggacgcggccatcagcgtggagcacggcacactgatcgtcaccttccccatcgaggtggcgttgcctcaggtgagtcgattccacgaatttggcggcgatatcggcgagctggacaccgcagtgtccaagctgctggttcgctgacttgcatgccgcgcgcttgctcatgatgattcgagacattcctccaaaggagaggaaaaatcacatgtcggttgcgggcaatccgaattgtgagcgctcacaaaaaatacggcatttttgcccaaaacgcacgctgaaacgttgccatgtgtacagagtcggcattacagtagcaactgttggtaaacaatggcccggtgtgccaaagcgcgccaaggccaccctacaagggagaattacatgacagttaagattggtatcaacggcttcggtcgcattggtcgtctcgccttccgtcgcatcttcgagctgcaggctcgcggcggccaggctggtgacattgaagttgccgccatcaacgatctgaccaccccggctaccttggcttacctgctgaagtacgacagcacccacggcaccttccgtcatgacgatggcactccggttgacgtcaaggccaccgaagactccatcatcgtcgacggcaaggaatacaaggtctacgccgagaaggacgccaacaacattccgtgggtcaagaacgacggtgttgagtacgtgctcgagtgcaccggcttctacacctccgccgagaagtcccaggctcacatcaacgctggcgccaagaaggtcctgatctccgccccggccaaggatgacaccaccccgaccgttgtgttcggcgtgaaccacgacatcctcaaggcttccgacgtgatcgtctccgccggttcctgcaccaccaactccatggccgccatggtcaagctgctggacgagaagttcggcatcaaggccggcttcatgaccaccatccacgcctacaccggcacccagatgctgctcgatggcccgcgtggcaccaagaccggccgcaacctgcgcgccgccgccatcaacaccatcgcccactccaccggcgctgccaaggccatcggcaaggtcgttccgtccgtgaacggcaagctgcagggccacgcccagcgcgtccaggttccggacggctccgtcaccgagctgaccaccgtgctgaacaccgagaccaccgccgacgagatcaacgccgccttcaaggccgccttctccgacaccgattactacggctacaacgatgagggcatcgtctcctccgacatcctcggcgacacccacggtggcgtgttcgacccgacccagaccgacgtcaacaccattgatggcgtgaccctggctcgcaccgtgtccttctacgacaacgagtacggcttcacctccaacatgatccgtaccctgctgtacttcgctgagatctccgagtgaaccattgcggtctaggccgctacggttcgtttgagaactaagctgtgagacccccgccttgtgcgggggtttcttcgtagtagaacggtaatcatggcaaagaaaagcaagcatgataagggcgcgggttccactccggcgacagtccaactggagaaggcgggcgtggaattccacgtatacgaatacgaacactccaacgaccatatggatgacggctacggcgtggaggcggccaccaagctcggcttcgacgagcatcaggtgttcaagacgttgatggcggacaccggtgccgaacgcgtggtgggcgtggtaccggtgagcggtcatatggatttgaaagccttggctgcagccgtaggtgccaagaaggcctctatggccgatcccaaggtggcgatgcgtgaatccggttatgtggttggcggcatctcgccgttaggccagaagacacgtcataagactgtgttggatgaaagcgccctgcaattcgaccaaattctggtctccggcggcaagcgaggcctgtccgtaggcgtgaatccacaagacctgctcaaggtcttgaacgccgttgccgcaccaatcggcacgtggtgaccgttcttggctcccctcacggaggggagccaagaatgactacttcttcctgcgcaactccgccggcagcacaaagtgcatgttttctttgatggtttcgacggacttcataccggtgaagcccaagttttgcagagcgtcaatcacaccggacaccagttcgtccggtacggaggcacccgaggagatacctacggattccagaccctcgaaccatgccgggtcaagctcgctggcatcatccacgcgatacgctttgccgcgctcccccaagccctcctgcgccacctccatcagtcgcacggaattcgaggagttggccgatccgacaatcaccacgcaatcggactgctgggccaccagtttgaccgcagcctgacgattcgacgtggcatagcagatatccgaactcggcggctcttgaatccaagggaatttggccttcagcgcggcaatggtatcggcggtctcgtccacgctcaacgtggtctgcgagagcagcaccagcttggtgtcgggcgcaaaatccagcgaatcgacatccgattcatgctcgatcaagtgcacgtgttcggggctctcccccactacaccgaccgcttcatcgtgacctttatgcccgatatagacgatttcatacccctcgcgcacgaaacgcagcacctcacggtgcaccttacccaccagagggcaggtggcatccaccacatgcatgccacgacgttcggcttccgccttcactaccggagatacgccatgggcggaaaacaccaccggaatacccgcttgggcagcagcatccggaatctccgccaattcctggacgaacaccgcgccttgcccggccaagtcctcgaccacatgcttgttgtgcacgatctgccggcgcacatataccgggggcagcccatcctcgcgcgtccgctttccggaagcctccgcggctttgagaatggtctgtacggtaagaatcgcacggtccacacccgcgcagaagcctcgcggatcagcgagcacaacgcttttggtcatcggaacctcctgaacgtcaatagtgttttccagtgtaaggcagggattacaggaatctgccgtcacaacttttccgcgtctcccacaaatcaccggtttccaaggaatccacgtgcttctcgcatgatggtgtgagactcgtcactccacgtattgctaccgtgtttatacgaattgtttattatatgccgcatatcgccaatccccgcctcgatagaggagacgcgctagactggggccagcgatagcaggagctaccggcccaccaacctcactacgggagtgattccatgacgagtaaaacaccacgcaccggaaatcagtattcgattcactatggcgattattccgccgtcatctgcgaactcggcgccaagattcgccgattcgattatcaaggcaaggaaattttctgcccgttcggcgtcaacgacctgacccccacctgtaacggttatgtgctggccccgtggccaaaccgcatcgaaaacggcgaatacgatttcaatggcaagcattactgcgcgccggttaacgaatatcatcccgcaccgcgcaacaatgcgaaccacggatacgcctaccactacatgtggaagcttgaatcgttgaccgatagcgccgtgacgctttcgctgcgcttccccaacttggacggatacccgttcgatgtgaccgtgaccgtcacctacgaactcggcgacaacggcatgaccgcgaccgtcaatgcccgcaatgatggcgacgaaccggcaccgtgggctctcggcctgcatccgtggctggccaacggcaagcagggcgcaactgccgccgaacgcgatgccgactccgccgcctgccacctgcagattaaggccgccagtcatgtgacggtgaacgaggcgctgattcccaccggcaccgaaccggttaccggtatctacgacctgaacgatggcccgacgctcgaaggccgcgcctttgatgatgcctgggttgacgtggagcgtgccgccgatggtacgaccaccaccacattcacccgcccggacggtatcgaagtgaaaatcattggcgatgagacgattaatgcttggcagtgctacaccgccactggcgcaccgttcgccgagcatccgtatggcatcgccgtcgagccgatgaccgccccggccaatgccttccgcactggtgaccacttggtgacgctcgcccccaacggcgactacaccactgtggtccgctacgaagtagtccagaagtagttctgttacgctggctcccctccagaggggagccaattttttatccttatgtgccgccgcgtcttgggacttatgcgatacgattgtgagcgataacaatttgttccacaaaggagtgtgcactatggctttgaagcctcgcactggtaaccaatatgtcatctcgtccggcgaatggagtgccgtcgtcaccgaactgggtgccagcctgcgcgagctgaagtggcgcggcgaagacctcatcgtccccttcgacccgaacaaggtcattccctgctgcaacggctgggtgctggcaccgtacccgaaccgagtgaccaatggtcagtattctttcgatggcgaagactaccagatgccgatcgacgagttcgaccgccaatcctccctgcacggctatgcctaccgctacatgtgggagctcgttgatttgcaggaatcacacgtgacgctctcctggcgctcccccgacatcgccggctacccgtttgatatcaccatcaccgccacttatgcacttgacgagaacggtctcacggaaaccttcaccgtgcacaacaacgacagcgtgaaggcaccgtgggcatttggcatccacccgtggctggccaacggcaagcacgccaccggtcaggccattaccgccgacaacgagccctgccgtcttgagctgcactgcgacacccacgtgaccgtagacgaacacttgctgcccaccggtgaagagccggtttccggcatcttcgacctgcgcgataaccccacgctggagggacgtggcttcgacgatgcctggaccgatatcaccaaccgcggtgaagacggcagcacttccgccgtgttcacccgccccgacggcatcaaggtcacgctgaccggcgacaagaccatcaactcctggcaggtgtgcaccggcaacgaaatcggcgagaaggctcgtcaggccggcgtggccgtcgaaccgatgaccgcctacgccgacgccttccgcaccggcaaggatctggttgtgctcgagccgggcgatgactacaccaccgtggtcaccttccacgccgaacaaatctgaaaaaccgaatagccaagcctgacgctcatcgccacatggacacccgtgttgcatcacgtcgtgctcatgtggcataattccgaaggcttatttttttactgcagcaaaggagtccatcatgggcatgcgcggacgtaagcgcaagaatcgtcgtaagaaggccgccaaccacggcaagcgtcctaacgcctgattcttcgcgtttcttatggaacgctcaaggcccgtctgatgatacatcagacgggccttgttgtatatgtcgttacttatcttcgccgcagcagtgatcaagcgtggccttgagccgggctatcagacattcgggtgccacatccgggcgcaagtaggcacgcaacgcggcaatcaacgcctgttcacgctcgtcgcagcaggtacgggggtcaaaacagtcgccctccgtaacgatatgcacgtccgcctggaccgacgcagaggccgagccggtatccactgaacgatgatgcaccgccgtgatatgcacttcggtctggctgaccatgccatcggcccccgtacgggttatggagatatggcgagtacgctctaccggctgatcgttcatcagatctcctttcccgaaagcttgcttgactgttgtggcgtgcgggcgccagtcgcatgactatgtctcactgcggcttgcgtgtcgccattgctaccaacagtttgttcactacttccattatggccggaatcggcgattcgaccaacgttttcgcccaacttcgcggatggtgaaccagccgacgaaccagtcacgtacccgcgctctttcgcatacgaggcgagctcacgcttgagttgcgtgcgggcgcgattcaggcggctcatcaccgtgccgattttcacgccctgctcatcggccacctgctggtaggacttgccgtcgatggcggcgtcgatgaacacctgccggcgttccggcgagagtttggcgagcgcggccatgatttcctcgggcgcgaaggcgtccaaatattcctcttcagcggacttgagcccatccgacgtatgttcggcggcatcgtaaatgtcccagtcgtcgtattcaccggtggagtcgttggcacgctgcgggcgccgcttggccttggcatactggttgaagtaggcattgcgctcgatggtggtcatccacgcctcgaagttggagcccggctggaatgagtcgaaggccttgaacccgcgttcgaaggtgtcctggaccagatcctgcgcgtcatcgggatcgttggtcagcctcatcgcctgccggtacagtgcattgacggcgggcatggcgagctgttcaaatctggcgcgcttggctgccatggactcgcccgatccggctgactgcccggattgcatagttgcttcgcttgtcgtcacgtttcaccattctaatcaaatcatgtgcccatatcgtggtcgatgacgtgtgagccacaacacgctgcaccccacctgtagaatggcgtatcggctagataatagggagtaacaattatggctttgactttggcttcggccgctgacctgctcaaggaacaccatctgctgcgtgaaatcatccaagggaatgtctggaccgacgacccggcccgtatcgcttcggcggatgagccgttcgccggcatcacctacgacacccgcaaggtcacgccgggcaccctgctgtgctgcaagggccagttcaaggccgaatatctgaacggcatcgacgaagccggcctggccgcatacgtggccgaaaccgagtactcagccgcaaccgccacccccggcctgatcgtcaacgacgcacgtaaggcgatgagcctgctgtccgccgcgttctacggatatccgcagaacgagctcacggtcatcggcgtcaccggcaccaagggcaagacgaccacctcgtacttcacgcaggcgcttatcaacgccgtctccggcggcaaggccgcattgttctcctcggtcgataattgccttgacggccacacctacgtcgaatccgatctgaccacacccgaatcgatggacgccttccgcatgatgcgcgaggcggccgataacggtatgaagtatctggtgatggaggtctcctcccaggcgtacaaggtggaccgcgtctatggcctgactttcgatgtggccgcgttcctcaacatctcccccgaccacatcagcccgatcgaacaccccacgttcgaggattacctgtattgcaagcgccagatcatcgtcaacgcgaagtcgctggtactcggcgcggacagtctgcacgccgatctgttgcgggaggacgcggaggcagccggcatcggcgtgaccaccttcgccctgcatgacgcggataatgccggcaccagtgcggacgtcgtcgcctggcccgccgacccggcgcacgcctccttccacatcgccgacggagatcaggcccttggcgactaccatctgtccatcgatggcgacttcaactacctcaatgcggcggcagccatcgccatcgcccatgcggttggcgtatcgctcgatgacgccgacgcactgcacgccatcgaatccgtacgtatcgccggccgtatggaacagttccgcgacccgcagtcaaacacgctcgccatcgtcgattatgcgcacaactacgcatccgtcaccgcgctgcttgacttcgtctacgagcgttggggcgaggaaaacccgcgtatcacgctggtgaccggatcggccggcaacaaggcctacgatcgtcgtaaggaaatcgtcgaggctgccgagaaccgtatcgcgaacttcattttcaccgccgaagatacggacaccgagccgatcatcgacatctgcatggaaatgcaaggctacatcacgaacaaggatgtggtctccacggtgatttccgaccgtctgacggccatcaccaacgccatttacgatgcccgtgcgcacgccgaccgattcaacatcctgctgatcatcggcaagggcaacgagcgttggatcaaggaccatcgcaagcatgtgccgttcgacggcgacgatcacgtcgtcgaacgcatgtttggcttgtgacgggattccggccaatcaaatcctgatcggatcccgattagcccacatcagatcacgcgcaatacgaccaaaccagaaacacgacatacggatacaaacgaaaaaggatagctgaatcgtaatgatcacgttggagaaagttgacggagccacactggaagccgaagccgagaaggccggcatcacgttgcctatcgaacagaccaaggtttggtctggttttcaggcggatatcgacggacgcacaccatggggcaattatctgatcaagcgtgatggtgaattggtcgccgtgatctcctttatcgattttgagacgcacggttatcattatctgcgctcgatgcatgggccggcgtgggtcgccaagcccaccgaggctgaggagcgcgaggtcgtcgacgccatcgtggacaccgtcaagaaggccgacaagagcatcgcgttcctgcgtatcgacacctggttcgccgatggtacggagaaggtgctgtccacagtgccgtacgaccagaccgtggtcatcgacatcaccggtggcgatgatgagattctggctcggatgaagcgtcgtggacgccgtgacgtgcgcaagtctctacgtgaatgcccggccgaggttgccgatgagacggataaggccctgaccgatttctccgaatattacgatgtgatggtcgaaaccggccagcgcgatggattcacgcctgctccgatgagcgactactccgatatgatcggcgcgttgggtgccgatcattgccgtgtgttcgccgcacgtattgaagaccgtgtggtggcatggtcgattgtcaccgtgaacggcacgcatgcggtgcgctactatgccggcatgcgcaacgaggttatgcgtctgcatgtgaccgacaagctgctgtattccgaatgctgcatcctgggctcgcagggtattactgaatacgatctcatgggcattggctccgacttcgcgccgtctctcaagggccttaacgagttcaagtgcaagttcaccgaggaaatcaccccggtggcccccgcccgcgacgtacccatcaagaaggtcttctacaagacgctgcagactgtacagggcgtgcgcaaggcattgcgctaatacctccccgctcccgctggtgggagctgtcgaacgaagcgagacagagggcggtctttcgatatggaccgccctctgtcacctgtggcaccagttcctaccagcgggaaccattcgtttatcgttcgagtttttgactcaccacggctgttacgccatcggctctcatggttacgccgtaaagcgcgtcggcaatcgacatggtgcgttgctggtgcgtaatgatgatgagctgcgcatgggcgcgtagctcattgaacgcattaatcaaacgggtcaggttcacgtcgtccaacgcggcctcgacctcgtccatcacatagaacgggctggggcgggcggtgaaaatcgcgaacagcagcgccagcgcggtcagcgaacgttcgccgccggacaggaggctcagctgtttgacgcgcttgccggccgggctggcctcgaccagtacgccggtggtgagcatgtcttccgggttttccaggcgcagtcgcccggtgccgcctgggaacagcgtggcgaacatctgctcgaacgcctcggcggtatcgtcgaacgcggatttgaacacctggaccatcgtggaatcgagatccttgatgagctgcatcaaatcgtcacgtgatttgaccacatcgttgcgctgatcattgagatacttgttccgctcctcaagcgcttcgaattcctcggtggccaaagggttgatcttgccgagtgcggccagatcgcggcgagccttatcgagacgcttcttctgctcctgacggttatacggcacggtcttaaagagggcggaatcgccgttggtgccggcctctcccccggtttctccctcttcggtcccagcctcagcttccgtctcatccaacggcacagggttgccctcatcatccagcacgggcaccggctgttcggggccgtaatcaccaaccaattcctccaaagtgagaccgagttcgtcggacactttttgcatgagctgcccggattcggcggccaaccgttcgcggtttacatccaaggcatgttcgcgcccggtcagatcagtgaccttgggctcgatctggttgcgctgcgcgcgcagggccttgagttcctcgtcatggctggaggcggcggcctgcagctcgtctcgtttggcggccacgtcatgcagcgtatgctctaccatggcggccactgctcgcgcgtcatcggccacgccttgcaggtgtgcggcctgctcgcgtctgcgatcgttcaacgcctcgatgcgggcgcggcgttcggcggtttctttggcgttgtcccgcagcagcccggcctgtcggctcagtgactcccctttgcggcttgcttcggtccacgcgatttttgcggcgacctcatgctcgcgagtcaggttcagttcgcgctccagcgtgcgttcgcgttcatcgagttcgtcgaaatcggcatgttccgctgtggattgctgggccgatgccaaagcgcgattgaggtcgtcaagcttgagctgatgctcgttgcgattctcttgggtctcggtgattttcctatccagctgctcgagctgacgggtgaacgatgcgacgcgatctgtggcggatttcagagatttctccgcctgttgggctttgagccgggcttcggtgcgtttggcggattcctggtcgacgagtcgagccgcttcatcgcgcttggttttggcctcggccacttgctcagccattccgccgtcttgggcggtcaactgtttgacctgtgccaatgctttgtctcggcgggcggccagagacaggtccgattgagagattgaagagccgccgaccgccgccacgccgtgcgtgaaggtctcgccgttcttggtgacggcccgcatggcttcgccggatgccacaatctgttgggcttcgtcggcggtgccggccgcggctacatcagccagcaggagacgcacggtgcgcacgaccgcttcggcctgtgccgggttctcggcatccgggttcgcggtgacgagtgctgccagcgcgttgcccgattgcggggcggcccccgcgttctcggcgctactctcctccgactccgtgcccggctctgtggcgggatcgccggcaatgctcgcggtcagcaccacggctttgccgagcttatcttcccgagcgcgttcgagggcgtgcaacatgttgcctgcctcgggtaccacgatggcgctggcatactggtcgagcgcgtgggccacggcttcttcccagccttcggccacatggatgaagtcggtgagtcggccaagcgaggccacgtccgtatcgcgctccaacgatccggaggcattgcggctgtctagcgtgtcggcaagcgcatcggccttggatttgagcgagatgatcttggactgtatctcgcgctgcttatcggcgcgttcattcagtcgttcgcggcattcggcgagcgtcgcacgtgcggcgtccaatgcggcaccgtcatcgtcggcaatggagtccgcttcgctgcgcaatgcgtccagctgttgctgggcatcgtcgcgctgggaagtcagcgagtcacgttgggaggcgtaatccttggcgcggctggtcgccagttgcacggcggattcctcgcgggcgatgagttcgcgcaatcgagcgatttgcgcatcgcgctcctgtgcggttttgcgcagttccgtcaaggtctgacggactgaagcaagcttcttctcgtcgtcggcgcgttcctcggtggccttgtcgagtgcgatgcgcgcatcggccacggccttggtctgtgccgcggcctgagactccagttcctcggctcgtttgacaagcatgccgggatcctcaccgaagttggtgacgatctggccggcgagtgaccggctgcgctcttcggccaactgggcgagcgcgttcagtcgttcacgggtctgcgagaattcatgccagtattggttggccttggcgatggccggactggattcagagctcaacgcctcgacctgttcgatgcgtactttgacttggacgagttcacgctgggcgacggccagctggttacgcacagcgccaagctcttgacgtaccgtgtcgcgacggctcatcgagcgttgagcgtcttcggcgtacaggcgggcttgggcgtcgcgtacggatatctgaatcgcgtcggcgcgccgggagatgcgtgcctggcgtccgagggggccgagctgacggtgaatctcccccagcaaatcgtcgagtcggctcaggttcgtttcggtattggccagcttgcgcaacgcgcgttccttgcgcttgcggtgcttcaggatgccggcggcctcttcgatgaacgcacggtggccggacgggtcggccttcagaatcgcatccaatcgtccctggcctacgatcacgtgcatctgctggccaagaccggtatcggagaggagttcctgaatgtcgagcaggcggcattgcgagccgttgatcgcgtattcggagcctccgttgcggaagatggtgcgggagatggtgacttccgtgtaatcgatatcgagcgtgtgatcggaattatcgatggtcaggctcacctgtgcacggcctaatggcgggcgggaggacgtgcctgcgaaaatcacgtcctccatcgaagtgccgcgcaggtttttggcgccctgctcacccattacccagatcagggcgtcgacgatgttcgacttgcccgaaccgttggggccgaccaccgccgtgatgccgggctcgaagcgcagcgtggtgacggaggcgaaggatttgaatccgcggagggtgagttccttgagatacatggcgtgagactgttttccgtatgccgggtgtccgggtatccgatatgccttggatgcaggttaccgggcgtcggcggaatcgtcggtgtcggcgctggctgtgtcagtgctgtcggtgtcggcactggccgtgccggtgccggcgtcaccggcgtcaccggcgtcaccggcctgttccttaccgaggccgaggacgtcgaacacgtcgaagtcgtccgggcttaccgaatcctcgaggttgtcggcggcctcatcctcggccttgtctgccggctgatccgaatcgtccgggtcaaccgccggctgatgaacggccatagcctgcctcatcgtggggctggcgtgttcctcaagcatcaggcgtgcgtcgccggcggtgacgaagctgccgcagataagcacgccgtggccgtagcccacgcccagctcgtcctcggcatcgaccatattgacggcggtctgaatcgcgtcaggcaggttcgcttccttgatcacacggtcacgaccgaacacgtccacggcaatcttctcaagctcgtcggccggcatcacgcgctcgcgccacgagttctcggtgaccaccacggagctcaggatcggctccagaacacccagatattcctcgacctgcttgtcgcgcatcatggcgaccacaccgaccagctgcttgaagtcgtagctttcctcgatggccttgcgcagggcttcggcggcattcacgttgtgtccgccatccagaatgatggtcggtgaggtgcggatctgttcgatgcgtccgggaatcttgaccgagctcaacgcctcggccaccaagtcgccgtccagcgggccgttgaccggaatcaccacttcggaggcggcgagcgcggcaagcgcgttgtgggcctgatgctcgccgaacttggcgatcggcacgccctcgtaagtgccgttgggcgtggtcagggtggcgacttggccgccgactgcggccatgcggtcggacgcggtcatttcgtagccgtcgcgcacgagcatggcgtggttgcgttcggcggcttcggtgagaatcggcatgacggcttcctcatgcggctgcgggccgatgatggcggtgcagttcggcttgatgatgccggccttctcggtggcgatctgttcgacggtgtcgcccagccactgcatgtggtccatgtccaccgggccgatgatggccgcatccgcgttgagcacgttggtggcgtcccacaggcctcccatgccgacctcgacgatggccacgtccacgggcgtgtcggcgaacttccagatggccatggcggtgagcacctcgaagaagctcatcttcggcttgccttgctcctccatcttggcgtccaccagggccacgagatccttggtctggtcccagatgtcgatgaaatcgtcatcggacagctgctggccgtcgatggcgatacgctcgttgatcttctccagatgcggcgacgtgtacaggccggtgcgcataccgtaggcgcggcagatggcctcggccatgcgtgcggtggagcctttgccgttggtgccggtgatatgaatcacgcggaacgactgctccgggtggcccaggatgtcgagcatcaggttcatccggtcgagatccagattggtggtgttatgctccggcgggcggctcatgatgtccagttcgacgtcccgcatgctctcattgttccgattcggatgctcgaatgacatatcctcttctaacctctgctcgtgttgctgttgcgccgttcggagtgcgtatgccacttacgtgttcgcgccattctcgtcatgtctacgcatgcccgcatatattccgcttccgcatgcgcaggaagctccccttgcacaggtttgccccgcatggttcgggattcttgccttcacgcgtggagccgcactccctcaattccctctatcctagccgccggggtggtttatcgtgcgcgcacagtgaaaccgtctcatatgtcgccgccgcgcgggcagtctctacctgcagccacgcacagtgaagccgtctcatatagttgcaatgcggctcttgccgtcggcatctcattcttagtcggctgcaatccaaaacttgtatgtccggcgacgctgatgctattcagcgtcggtacagtgccagcttctggcggtacaccgacgctatgatgctcttgcgagtcggtggctggccaaaacctggattaatcccgactccatcgcctctcagtgtcgtctcctcgccaaggcatgccattctgccgtcgttgagaaatttcaacgtcgtcaatcgaccatgtcttgccccggaaacgactctcacaaacgtcctctacatcatcttttgaactcgcagaggctcattcactgttatgactgctctcaccgtcggcagccgtccaagccctggatctatgccgccaataaattgcagcaaatcgtcggccccgatacaaccattggactcacgccgacgctagattccacactcagacagaagccagccaatatctgaaccagcaccgacggcgtacaaagcataagcaccgttaaccgtcaattcgccgccctctaccagctacatccgccttcgccgatgatatcttgttcgaatccccaaagcacgttgttcgaatgacattactgatggtggataagttttgtgtgttatccactattccgaattagcggcctaataccttgaaattatcgggagtatctcgctccaagacagccaagctccgaggctagaaccacaatggctgaaattcatacttacgctgcttcgttccggctacgctcgacgtcatgaagacacacaaagcagtggcctcgctcatatcagccgcgcagaatgagctgagatgcgtctattcaagaaatgaagcggaacagaccgctctacgccgccgtgcccagagtggtgagttgttgaaagtgtatgacggcattcccagtctttatgcaaatactgcatactgggatggtttgacgccgccggagcgaacgttgcatatagcccgcgctcttgcgcaagagcatcctcagtgggtttttggcggcttggtggcagtaagtgcctatggattcgaacatcaatggcatttgcatgatgactgcataaccatcgtgacttccgatcatggatctcgtcaatgccatcagcgcttacgacatgtctatatgcccgatatgaacaatccgaagacacattacgaggcctccggcctatccctgatatcaccggctagaaccttggtcgaggccgctatagaccttgattttcggtttgcgttaccgatctttgactcggcccttgccaagggaataaccaaggaagagatagccgccgactgcgttcaatggagaatcgattatgcccgagtattccgcctgctgcgctatgcaaacgaaaggagcgagaatggtggagaatccctcgcgcgaggcaccatcatcgaagatcgcttcctcacgccgcgtattcaggtaacggtgaccgacccacagacgaataccgagtaccgcgttgatttcgtatggaagctcgatgacgggcgcgtgatagtggccgaatacgacggcacacaaaaatacgtggacccagccatgaccgataaccgcagcattcaggaggtggtggccaaggaacgcgcacgcgacgagggactgaaacgagccggtgccaccgaaatcgtccatttcacatacgccgacgtcatcgaacgtactccgctgcgggtaaaactgatcaaagccggggtgtctcaggtggagacctccgcatagcagtgagtcccgcgacgcgataaaccttcatcgcatgggttcacatggattcagcccacagaatatgtcaatatcaatcggcaagctccagcccaagcccatgcccctctccttccctaccgagaacaataaacgggcccgcattccagcccgccgcactcgccatatgggcatgtccggaagaccgtccaaattccgtacttggttttaccgtcagccgtcaatcgtggcacatcgcataaagccgactaatatgaggtgggaatcgatgattcgacaacaactacatacaggagagtggcaatgggtgaagtgatcaccgccaaggacaaggaatatgaggccgaagagcgcgctacggcaccgggcgcgaaccagtcgatgagcgaccgcgtgaacaaccgctcgctgcgcccgcagtcggccgcattcaaggagttcatgaagtccggctgggccgacgatgatccggagattaatcctctcgaatcctccaagttcacgccagcccgccttgaggcgctgggcaaggccttcccgggcgaacgtctggtcattccggccggccagccgaaggtgcgcaacaatgattgcgattacatgttccgcccggacaccacgttcgcctactacaccggtctgggttccgattacgaggccggcgccgtgctggtcctgaacccggtcgaccccgactcccccgaagccgccgccggcaagacgcacactccggaactgttcgtggcgccgcgcgccgacaactccaccgaggacttcttcatgtccgcccactacggcgaatactgggttggcccgcgtgccggtctcaaggagatgcaggcgatgaccggcatcgaaacccacgacatcgcccagctggccgacgccctgtccaaggacgtgggtgccgaagccggcgccgtacgcgtgcgcgtggtcagcgaaaccgacccgcaaatcacttcgatggttgaatccatccgcgaggccaacggtttcgccgatccggacaagaactccgcatccgacgacaagctgcacgagttcgccgccgaggcacgcatggtcaaggacggctacgaaatcaacgaaatgcgcaaggccgtggacgccaccaagcatggcttcgaccgtctgctctccgcactgccggccgcgctcgacaagccgcgctccgagcgtatcctcgaaggcgcgttcaacgccgtgtcccgtgaactgggcaacgccgtcggttacgactccatcgtggcctccggcccccacgccccgattctgcactggatgcgcaacaccggtgtggtgaagaccggcgacatgctgctggtggatgccggcgttgaggtcgattccctgtacacggccgacatcacccgcaccttcccgaccaacggcaagttcaccgacttccagaagcgtctgtaccaggccgtgctcgactcgcagcaggccggtttcgaagccgccaagccgggtgccacctactccgacatccaccacgcctgcatgcgtgtgatcgccgagcgtctgcacgattggggtctgctgccggtgagcgtcgaggagtcgctgtccccgcaaggccagcagcaccgccgttggctcgcctgcggcgtggcccaccacctgggtcttgatgtgcatgattgcgcgcaggcccgtttcgagtcctatcagggcgcgccgattcgcccgggcatgatcttcacgatcgagcccggtctgtacttccgcgaggatgatctgctgattccaccggaataccgcggcatcggcatccgcatcgaggacgacgtgctcatgaccgagaacggccccgaatggatttccgccggcatcccgaagcagatcgacgacgtcgaagcctggatggccgagcaggctgcccaagcgaagtaacctaagctccctctgatgagggagcttcttttctactaaggaggcaatgtgtccactccggaatttgtgttggaattgcgtaagaagatcggccatgatctgttgtggctcaatggcgtgaccggttgtgtactgaacgaacatggtcaactgctgttgggccgtcgttcggacacgggcgaatgggcgatggtctacggcatcaacgagccgggcgaacagccggcggacacggtggtgcgcgaaatcaaggaggaaacgggcatcgatgccctcgtcaccgatttggtggccgtcacctcgtcagacaaggtgctgacctacgccaatggcgacaacaccatgtacatggatcattcgttcctgtgcgccctgaagcccggcggcaatgccgagccgttcgtgggcgacgaggaaagcctgagcgtcggctggttcgatctggatgacctgcccactcccctggcggccagcacgagcgagcggctggagctgttccatacttacatcgagaacaaaaaacacggcgacgcccacgccctgttccagttcgatgggcagcagtactagcggatataaagttagctccctctgacgagggagctccaatgctatgcgattacgcctcttgggctaggagctcgtggaggtgggcgcggtgttgctgctgttcgcgcgggtcgggcacgggcagggaggccagcagcttcttggtgtacgggttctccgggtgctgcataatctggtcggcatcgccgtgctccacgatctggcccttatgcatcaccatgatgcggtcggcaagcatatcgaccaccgccaaatcatgggtgatgaacaggcacgcgaagccgatttccgcctgcagtcgcttgaacagctccaacaccttggcctgcaccgacacgtccaatgcagaagtcggctcatcggcgatcagcagcgacggcttcaacgccaaaccacgcgccaaagacgccctctggcgctggccgccggacagctcatgcgggaaacggttcatgtaggcgcgcggcagctggaccatctccagcagatcgcccacatagttcttggcctcggccacggaaccgtacttgtggtgcacgagcagcggctcggccacattctccgcgatggtcatcagcgggttgaacgaggagcccggatcctggaacacgaaaccaatgtccgcgcgcttgggcttgaagtcacgctccttgacgccgttcatctcgatgccaagcacgttcagggagccgccggacaccttctgcaggccggcgatggcacggccggtggtggacttgccggaaccggactcgcccaccaggcccagcacttcggagcggtggatggtgaagttcgcgccgtccacggccttgaagtcgggctgcatgagatggcccgggtacgtgatggtcaggttcttggcctcaacggcgatcggctgttcgcgccaatcggccttgcgctcgatcggcttgccctcgcggtcgcgcacgaccagcttctgaccgatgcgcggcacggcacccagcagtcgcttggtgtagtcgtccttcggatggtagaagatctgctccacgtcgccctgctcgaccacgtggccgcggtacatgacgaccacctggtcggcgatgtccgcgatcacgcccatgttgtgggtgatgatgagcacggaggcgtcgaactcgtcacgggcgaggcgcagcaggtcgagaatttcggcctgcacggtcacgtcgagggcagtggtgggctcgtcggccagaatcaggccggggttcagcaccaacgccatggcgatgacgatgcgctgcttctggccgccggagaactggtgcgggtagtagtccacgcgggtttcggcatccgggatgccgaccttcttcaggatgtcgatggccttggcgcgcagttccttcttgtccttcatgccgtgggcgcgcaggccctcttcaatctgccagccgatggtgtacaccgggttcagcaccgaattgggctcctggaacaccatcgcggcctcggaaccacgcacttcgcgcagctgttcgccgctcagggagagcacgtccagcgaatcggagccatcgcgcttggacaggtagacggcaccggaggtggtggccgtctccggcagcagcttgatgatggagcgcgcggtcacggacttgccggaaccggattcgccgaccacgccgaccacggtcttgcgcggaatggtgaagttcacgtcctcgacggccttgatggaaccggcgtcggtcatgaaggagacggacaggtccttgatatcggcgagattcttgttgtcttcgctcatctctcactccttgccttccggcttgccctcgccggtccattcggaggcgacgatggtcgggtcatggtcggtgacggtggccggcgggtcgacgttcgcgtcgagttcggcaatcacctcgttgcgtgcggacggcttctcgtttgggtcgacggacgtgtcttcgatcgatccgaccacttcgccggcggacttgcgggcgcgcagacgcgggtcggccagatcgttgagcgattcgcccacgagcgtgatgccgagcacgataagcacgatggcgatgcccgggaacacggcggtccaccagatgccggcggtcacgtcggaaaccgaacggttcaggtcgtagccccattcggcggcggcggtcggctcgatgccgaagccgaggaagcccaggccggcgagggtcaggatggcttcggacgagttcagcgtcaggatcaccggcaacgtgcgggtggagttcttgaacaggtgcttggtcatgatgcgccaggtggaggcgccgaccacgcgcgcggactcgacatacgcggattccttgatgcggatcacttcggcgcgaattgtgcggaaatactgcgggatgtacaccacggtgatggagatgccggaagccagaatgccgctccacaggccggactggccgtgggagatcatgatggccatcagaatggcgagcagcagcgaggggaaggagtagacggcgtcggcgatcatcaccagaatgcggtccacccagccaccgtagtagccggacaccagaccaagcagcacgccggcgaagatggagagcagcacggccacgacgatggcgatgacggcggtgcgggcaccccacaccacacgggagaacacatcgaatccggcggcggtggtgccccagatgtgttcggcggagggcgcggcctgcgccgggaaggacgtgccgtcggcggccttgatctgggcgtggccgtagggggcgatcagcggggcgaagagggccacgagcaggaagaacgcggtgatcgcgagaccggtgatcagcatgcccttctgccagccgaccgccacgcgcagttccttgatgatcgggatcttggtccagaacggcgtcttggtgctgacgttgagcttggtaaggcggtcgtcaccggggacggtgatcttgtcttgggatgcggtggtcatctcagtacctcactctcgggtcgataagcgcggcgatgacgtcgacgaggaagttgacgacggccacgatgatggcgataaggatcacgatgccctgcacggccacgaagtcacgggccttcaggtactgggacagcatgaagcccaggcccttccattcgaaggtggtttcggtcaggaccgcaccggcgagcatcagggcgatctgcatgcccatgacggtgatgatcgggatcagggccggtcgccaggcgtgcttgttgagcaggcgcttttcggagacgccgcgcgagcgggcagcctcgacgtagccggaattgtaggtggagatgacgttggtgcgtaccagacggatgaacacgccggcggtcaggaggcctagggcgacggccggcagcacggcgtggcgcagcacgtcgacgagcacgttcatgtcgccgagctggatggcgtcgatgatgtagaagccagtcggcgataccagacgggtgaactgcatttcggagttcaggtcggagcggccggaggctggaaggatgttgagccagacagcgaagatgagcttcagcacgaggccgaggaagaacaccggggtggcgtagcacaggatggcgaaggtgcggatgccggcgtcggcggcacggtcgcgtttgcgggcggcgagtcggcctaggccgatgccgacaatcagcgccacaatcagggcgaggaaggccagttcgaatgtggcggcgccgtagtgcgtaagaatgctgatcaccggctggttatcggtcagcgtcgtgccgaggtcgccgtgcagcaggccgccaagatagtcgacgtattgcacaatcagcgggcggtcatagccggccgcgtggatgcgctgctggagttcggcgggtgtcaggcggccgcccaaggcggcggaaatcgggtcgccggtggcgcgcatcacgaagaacacgatggtgaccagaatgaaaacggtgggaataatgagaaggaacctcgtcagcacgaagcggaagaaactacctgacagtcggttcttcttcgtcttggctttcgccggagtggtgctggaggtcgctatggcgctgtctgacacgcgatgctccttggtgttggtaatcggtatataaagcaataaaggctcccctctccgaggggagctggcggcgaagccgactgaggggagtcatacgagttgggctcccctcagtctgccgtcggcagacagctcccccttcaaagaggggagctcatgctggatcagcccttggtgacggaggcatagcggaagcggaaggaagcgtcgagggtgacacccttcacggaggtgccggtgacggcgacctgggcaccctgcagcagcgggatggtggagaggtcttcggtctcgagcttctgaatctgcttgaggatgtctccacgagcggactcgtccttctcgccggcctgcttgacgatcaggtcgttgacttccttgttggagtagccgttgttcacgaagttaccatcgcggaagaacggggacaggtagttgtccgggtcggagtagtccgggaaccatccaagctggtagaccgggtacacaccgtcggaatcgtcggtaaccacacgatccttgttgtactgggtccattcggtggactgcatgtcgaccttgaacaggccgcctgcctcaagctgggacttcagggcagcgtactcgtcggcggagacggagccgtagtggtcgttgttgtactggagcttgaggtcgaccggggtggtgacgccggcgtcggcgaggaccttcttggccttctcggtgctcggcttgccgttgccgtcgccgtaggcggacttcagcgtgtcatcgtgaccggccaggccgtccgggatgaaggagtacatcggggtgtaggtgcccttgtagaccttggtggagagctcttcgcggtcgatgaggttggcgacggcctggcgcacggccttggccttgttggcatcggcgtcgggctgggattcgccgtagggctgaatcttgaagttgaaggcgatgaagcgctcctcaccgcccgggcccttgacgaccttgaccttggagtccttggagaggtcctcgatgtcggtcgggctcagggagcggtaggccacgtcgacctggccctgctggacggccatcttcaggttggaggcgtcggcgaagtacttgacctgcacgacggagttcttggccggggtcagacccttgtaggagtcgttcttggcgtaggcggcggactcgttgatcttgaaggctgtcagcgtgtacgggccggcgaaggccttcttggagacgatggtgtcggcgtcggcgagcttgtcggcgtcgaaggtatcctcatcgacgatcgggccggcggggctggacatgacctgcttcagggtcacgtcgaagggcacggaatccttgaacaccacggtggtgtcgtccttggcggtcacggattcgacgttggcgagcagggagctcgggccgttcgggtcgttgatcttcttgatgcgatcgtaggagaacttgacgtcggaagcggtcaggtcgttgccgttggcaaacttcaggccgtccttgagcttgacggtgaattcggtgccgtcatcgttccaggtaccgtcatcggcggcgatgtccgggctcagttcggaggtgttgtagtcctgggcgtacaggaacgggaacacctggatctgcacggcgtatgaaccgttgtcgtaggagccggcggggtccaggctggtgatcttatcggtggtgccgatggtgatggcgttgccggaatcggcacctgcggtggtgtcatccttcacgccgccgcaggcggtcagggatgcgatggcggccacggagacggcggcggccagaatcttcttggaattcaacaggaatcctctctcataacttgtttccacgtcatcactgcgggcgtggattaccgcctgactatggtgcggatgtgttacctctgcgtttccatagtcatcgacttatgtttcgcttgtggcgaccaaggccggttttatgcggtatcgagcagtattacggattcttgtattacgacgtgaataacggtcacatggtgagacaaatatactatcatctcaccatgtgaccatgttcgtagacgaatgccttccattcgtcaaccggtcggcctactgctacttgagcttgcggcccgcgcaccacacctgttcgaccgtccagtcggccgggtccgcaaggttgaaatcggcggcgaagccgggggcgatgaggccgatcggcgccccggtgaccgggttcggccggtcgaagccgaacgccttggccggcgtcagagttgccgcctcgaccgcgtccaccgggctgaagcccagttcgcacaccgcacggcgcacggcgacctccagcagcagagtggagccggcgatggcgccgttggagaccaggcgcgcatgcccgccgaccacgttcacgtccagcgcgcccaacttgtaggcgccgtccgggcagtcggtggcggccatcgcgtcggtcacgaaggccgtgcggtgaggcgcgaaccggaaggagaggctcaccatcggatcctgcacgtggaatccgtcgttgatgagctcgatggtgacgcgcgggtcctccaccgcggccggaatcggaccgggttcgcggtgatgcaggccgttcatcgcgttgaacatgtgggtcatgatgcccgcgcccgcgtcgaagccggctttggcggtctcgtagtcggcgtcgcagtggcccacggccggcaccacgccggcagcggcgaactggcggatggcggagatgccgtggggcagttcgggggcgatggtgatctggcggatgcagccaagcttgccggaggcggggtcggcaccggaggcctcaagcatcttatcgacgatgtcaggcaccggatccttgagacattccgggtcatgtgcgcccttgcgggccagggccaggaacgggccttccagatggcagcctaggatgtcggggcggccggactccattgtggcgcggacggtgcggatgttgcggcagatcacgtccacggggttggtgatcagcgagagcacctggcgcgtggtgccatgcacggcgtggccggcccgcgccacgtcgatgccgtccggcccgtcatcgaagctcttctcccatgcgccgtgcgcgtggatgtccacgtagccgggggtcagaatacggccttcggcgtcgatgaccgcgttgcgatcggccgggtcgagccccaccgtgcggcagtagtgctcgaaggtctcctcccccgtgccggccgccacgatgacgccggcggcatcggagacgacccaatatccgcgccgttcgccgcgcgcatccaccttgcgcgcgttacgaatcgccaccggagccggcttgccctccagtgccgcggtcacgcgcgagactatctcgttcctatcagacatgttgttctccttaccgctcatgcgctcccgctggcgggagccagcacacgataactcagatgccctgccaggccggcttgtgggtgtaggcataacggtagtagtccttgtggcgcaggcgggacgcggcctcctcgtccacgataatcgtggcgtgcgggtgcatctgcagcgcggaagccgggcagaacgctgacacgccgccttccaccgtctcctcgatggcttcggccttgccggcaccgaacgccagcagcacgaggtgacgggccttcatgatcgtgccaataccctgcgtgatgcagtgggtgggcacttggttgatgtcgttgtcgaagaagcgcgcgttgtcgatgcgggtctgttcggccaaggtcttgacgcgagtgccggaggccaacgaggaaccgggctcgttgaagccgacgtggccgtcggtgccgatgccgaggatctgcacgtcgatgccgccagcggcttcgatggcacgatcataggccgggccggccagcgcgactttgtcgccgtcttcgagcggagtgccgttgagtacgtcgccgggcacatggaccttggccgggtccaggccaagcggttcgaccacggtgcgatggatggtcgcatgataggactcgggatgggtcagcggcagcccgatgtattcgtcaagcgcgaaaccacgcacgcccgaaacgtcaatggcctcgtccttgacgatcttggcgagcgcctgataggcggccagcgggctggagccagtggccaggcccagcacggcgtccggctttgctttgatcaggtccgccacgcaacggccgtagatctcgccggcctcggcttcgttcttgacaatgatgatttccggcatcggtttcctccagttccgtgcggcccgcccgatgcgagtcgctgtaccgccgcccgtcttgcggataatggcaacatccttgtcacgtccgggtgccgcgcggcgttccaaccaccgttcggcgtagcgccgattggtgattcgctatttgttaatgatactaacaattttggaccttatgaacactcacggtgtttcctgacgcttcacacaggtacactggaatttattagtgaagtttcataacagtttcaacgacgaaattgcgcttcaccgtctaagctgtgtatggaacaacaatcgccgtccactcgctcaccatcaggcaggaggaaacatgtcatatctcggtctcaacacaacgaccgacgaccatgcggccaaggcttcccccgccgatgtgcgccgcaagaaccgccaacttatcttcaggttgttgttccccaccaaccagtattcgcgcgccgagctcggccgacgcaccggattgagccgcgtggccgtttccgatgtggtcggtcggatgctggaggaaggattgctgcgcgagaccggtcaggcacccagcggcggcaaaggcaaacgaggcacactgctgagcatcgatatcgatcgactgcgcatcatcagcatcgacctgacgcaggagcacctgctgcacggcgcagtcaccaatctgctcggccagccgctgcgtcacgccgaagtcaccctgaacaccggctcattcgtttccgtggatgtgatcatcgagctcattgagaagatgctgggcatgtccgatggcgaggtcatcggcatcggagtcgcctcccccggcgtggtagacaacggcgtggtccgctcctccacgatgcgcggctggaacaatctcgacctgtccacgccaatcgccgaacatttcggacttgaagtaaacgtcagcaacgacgccaccgcagccatgctcaccgaacgtttctttggccaaggcgggccgaatatgcttttcgtgcgcatcgaaagaggcatcggttcggcgattctgctctcggacacgccggtaatcggcgaactgcacgcggctggcgagctcggccatatttccatcgatcttgacgggccgctgtgcccttgcggcaagcacggctgcctggagacgatgatttccggaaccgcattgaagaagcaactcagcgcagcagacgtggagcagcatcagggtatccttgctcgggcgggccgctatctcggccaggccctgtccatgcctgtgggccttttggatatggcagacgtatgcgtctatgggcagccgaacatcatcaacgagacgttcattgacgcggcacagcagtatctggatgccgccacgtcctcgtccttccataaacacacggtgatccggcgctgcgaatgcggacccgacatcaccgtacagggcgaggccatcgccgtggtcttccaacacttggccaaataaagctggccaccccggcaacgaaacgcgcaaggccaagcgcggcacagcacgacataaagcgatataggaccgcatggaagatgcggtctcggagacaaatccgacgcctcatcttccatgccccggcactatgccagtgctatgccgccatggcggcaccgatggctccgaccggttgatcgacgggtgccagacgcagccgggccggcaggtccagcgtttcaaggaatcggcattgcgattcgcgccggcgcagctcagccgcgatcacctcgaccaacggttcaccggttttggccatgccgccacccaagacaatcagtcgcgggtcaacggattgggccaaaatctggatagtgtcgccgatggcgcgcactaccatgtccagcacatcgacggcctcggcctcccgctttttcgcgcgacgaatcaggtcgggcatcggcgggtcggcgttgggccacagacgtcccacggatgcgcccgagcagacggtttccaagcatccgtattgcccgcaagggcacttgaggcgatgaggttcgactgggatatggccgatttcgccggccgcaccgctatagccatgcatcagcacgccgttttcgacaatgcccgcagccagtccggtgccgaagttcaggaacgcaatggtaccggccatgccatctgcaccgcccaacacggtggccgcgccgacggcggcggcgttgacgtcgttttccacatgggccggcacgcccgaacgctgcgagaccaacggccccatatccagcgagaccacgtcgagattcacgatattgcccacatgcccgctggccgaatccaccgtgcccggggtaccgacaccgatggccctcacctcgtcaaaacgctcacccgctgcctgatgtgctacagcgacgatgtcttcgatcacggcatcgttgccatgtctggcgggaatacgggcggaacccaataccgtgcccattgcgtcaaccagcacagcttcgatttttgttccgcccacgtcaacaccgattttgagattgttcatagtgttttcggacatcagtcctcccctgttcttcatcgaacgtttcgcttgatatcagtgtacatctgactattgacaactatcttaacaaattcacccaagacgacactcacatgcacgacacgccgaatgacatattgattgcgtcaatcaattaacagcgttaatatcttaatcaagttcagattcaaagacgagcggaacaactcgcagcggtgcagacaaggaggacttaagaccgatggcaacaaacaccacccacgccacttcccaggccagtgtctccgaatccaaccgctcccgcatcgtcaagcacctgtatcacaacggcatcagttcccgcgcgcaaatcgccaaggcactggaactcacccccgcggccatcaccaaaatcaccgcacgccttatcgaggccggcatgattgaagagaccggcgatctggaaggctccaagaaccgccgttccatcggactcaagctcaacaccacgcgcttccgcgtcatcggcatcaaattcgcccgctcgctggtgcagatcggcgtattcggcctgtgcggcaacgccctgagcatcgagaacctgcccacggtctacgacaacaccatcgacgacaccattgccaccatccaccagcgcgtcgaacagctgctcgacaacgatccatccatcgtggccatcggcatggccgtgcccggaccctacctgcgcaacgtgggccgcaccgccgtggtctccagcatgcagggctggcgcagaatcaacttcatcgacgaattcgtcaccgctttccgcgtgcctgtgttcatcgaacaggacgcccgcgccggagccctcgcacattatctcttcgacccgtcggtgcacgccgacggcaacctcgcctattatctggtcggcgaaggcgtgggcctcggcgtcatcgacaacggtcgcctcatcaacggcttcctcggtgccgccaccgaaatcggccacatctccatcgacgtcaacggccggccctgcgactgcggcaacatcggctgcctcgaacgctattgctccacccccgccatccacgacatgctcatcgaaagcggcaccgtggtccccgacgcggccgacatgacccatgccgaggccgcccgcgccctgtttaccaaggccagcgtcggcgacgaagacgcggcttccatggtccgcgaaatcggccggtacgtcggctacggatgcgtcaccatcttcaacggatacaatcccgagcacatcatcatcggcgacatcgtggccgaagccggcccgatgctgctcgatgaggtgcgcgccacggtggccgaacgcgccatccccgagatcaacgccgccacctccatcaccctgtccaccctgccgaccgacgccgccgtttccggcgccgcggcagtggccgtcacccaatttttggagcacccctcggtgttcttcgacgtctcctgaccggggcgccgagtgagatttccatacggaatcgaacaacaacaaggaaacaaaggaaaggaaaccaaccatgactaccccgatcgttctgagcctcggtgaactgctgtgggatatgctgccgagcggcaagcgagccggcggcgcccccgtcaacttcgcctaccacgcgatgaagaacggcaccgaaggctgggccatcagcgcggtcggcgaggatgaactcggcgacgaactgattgccaaggccgacgaggccggcatcaacaccgttcttcagcgcaacgcctggccgacctccaccgtcgaagtcgcgctgaagaacggtatcccggagtacaccatcgtcaagggcgtggcttgggatcacatcctgtacacccgccagctcatcgacgtggtctccaaggccgacgccgtctgcttcggcaccttggccctgcgctctcccgaatcgcacgccaccatcacggagctgctcaagcacaccaagccgggcgcgatgaagttcttcgacatcaacctgcgcggcgaccactactccaaggagcttatcgaggaactcctcaaggtggccaccgtcttcaagatcaacgacgaggaactcctgctgctgcgcgacatgttcgacattcgcggcacctccggtgaagacgcctcccgctggttcctcgaggaattcgacctcgactacgtgattctgaccgccggctccgcctactccaccatcatctcccgcaagggcgaggtctccacgctggacaccccgcgcgtcgaggtgaacgacaccgtcggcgcaggcgactccttctccggcaccttcaccgcacgcatcctgctgggtgacacgctcgccgaagcccaccgcaaggccgtcaacaccgccgccttcgtctgcacccaggccggtgcctggcccgagtacccggccgagatgcccgactatctggctgaaatcggcaagtaatccactcccaccccattttcccgatggctttgccgctctataccggcaaagccatcttgttcagaggagtcaccatgtccattcgcgacaccgtcaccggcgtccagcatgtcggcattccgaccacggacctcgaaggcaccatcgcctactacgagcgtctcggcttcgaatgcctcggcatctatcccaacggtgaggaccgctgcaccttcctgcgcctgaacaacctgaccctcgaggtgtggaccatgaaccccacgcctatggaaaacggcgccatcaaccacttcgcgctggattcgacggatatcgaagcgtccttcgccgaagcccagaagctcggcctgaacttcgtggaaggctccatccagcacatcgacaccttctggagcaacggcatccgttacttcaacgtgcttgggccgaaccacgaggtcatcgaattctgccaaatcatgtaacgccatgatgacatccgataacggaaccatcactattcactagtcatcatccattgaccgatagatctgtcgtacgtccattcatagagaaaaagggaattcaaaatgagtagcgaaaccaccaagaccggcaacgccggtctcgtaaaaatcgcgcctgtgatgttcgcgttcttcgtcatgggcttcgtcgacctggtcggcaccgccacgaactacgtcaaggctgagttcaatctggccaacggcaccgcgaacctgttcaccaccatggtgttcttctggttcctgatcttcgccgtgcccaccggcatgctgatgaacaagattggccgccgcaagaccgtgctgtggtccattctcgtgacgctggtcgccatggcactgcccatcatcgcctacgtggccctatccggcaccgcacgtctggtgctcatcgtcatctccttcgccttcctcggtatcggcaacaccttgatgcaggtgtctctgaacccgctgctcaccgtgttcgtcaagggcgacaagctcgcctccaccctgacgctcggccagttcgtcaagtccttcgcctccctgttcgccccgtacatcgccatctggggcgccacccagctcggcatgtggtggatactgttcgtgatctatctggtcgtcggcatcgtcggctacgtgctgctcgccatcgacaagatcgacgaacccgcccccgacgccggcaccaccaccatcggccgctgcttcaagctcctgttctccgaccgcatcgtgctgctctgcttcctcggcatcgtggcccacgtgggcgtggacgtcggcatcaacgcccaggcgccgcgtatcctcaccgagcacaccggcgacaccttcaccgaaatcgccgccaccgccaccatggtctacttcgtggcccgtatgatcggctgcttcaccggcggcatcgtgctctcgaagatttccaaccgcgtcggcattctggtgtgcggcaccatcatgaccgcctccaccgtctgcttcgccatcttctgctcgatcacctccaacccgccggtcgccctgttctgggtggccgtggccctggtcggcttcggcaactccaacgtgttctcgctcttcctctcccacgcgctgatgtaccgtccggagcgccagaacgaaatctccggcctgatgctcatgggcctgatcggcggcgccatcttcccgcccatcatgggtgccctggccgacgccatgagtgcccagctcggcgccatcatcgtgatgtccgtcggctgcatctacgtgctggtcatcggcgttggatacaaggccatcattgaaggcaagaaggcagccgtcaaggcctgacgatcggcctggctgcggcttcctgaagccgatatacgaaaagccctgtgcgaatgatccgcacagggcttttcgtatatgtacttgtcgcttggctcagcgggacccgtcaggcatatcagtttcggtgtcgatgacgatggtcaccggcccgtcattgaccagtccgacccgtatatgcgcgccgaaacgaccttccttcaccggcactcccccggagcgcaacgcctcgttgaacttgatccacatgagatcggcatgctcgggcttgccggccttgatgaagctcgggcgattgcccttgtgcacgtcggcgaacaacgtgaactgcgagatggagagaatctcaccgccgatgtcctgaatcgaacggttcatcttgccctgcgcatcctcgaacaccctgagattcagaatcttatggaccaaccaggcgatctgcctgtcgccgtcctcatcggtgacgcccaccagaatcatgaatcccgggccaatctgctgcggctcgaacgtgggatccagcgtgcccaattcattgaccacgtccacggacgcttcggatactcgttgcaatacgactttcatggttccctacagtacaacgtgtgcagtcaccagccggtaacgtacgcgaccgactggcgaccggcaatatctgcactgcagttcatcgtttaccgcttcattcgacgacgagaccgatagtcatcacgaacaccaccaagaaagtccggcgcgttgaggtcctcaaggtcagcacctccgcgcacggcggtcgcggcacaggcaacggcctcaaacgaggctttgattccctgtccatcggcatgaaaatcagtggcgcatcgcggtgagataccaaaatcgccagccgtctgttcggcgtcgatgttcgcgcccagaaacacaaactcccaatgatagcgttcacgctcataggtaatcatctgcttgatctgatgcaacgaatatcgacgactcgcgttctcatacccgtcagtaatgatgacaaacagcacatgttgagcacggtacgctgccgcagtatgtcgttgcgtcacgatcatgcggtcaatggccagcccaatcgcatccaacaacgcagtgctaccgcgcacccagtaatcccggctcgtcaaatcgttcacttcgcggatgtcgaggtgattatgcaaggtttcgattcgatgatcgaacagtagggtcgttaccctgcactcgccggcaattgttcgctgcttggacagcatgctgttgaagccaccgatggtgtctgattccagacctcccatcgacccgcttctgtcgacgacgaacaccagttccgtacggccgttattgccattgtcgttcttgcccatgatggatcctttcgctcattcgccagccggattgtcggcgatatcaatgagcttcgcatcatgggaccagtcctaggtcgcttggcaagcgacaatatgccgcgtatcggcagcaggtcaggagacgagcgtaccgctccgcatcattgcccaagcaacggctgatcgtatcggaacaacatctcgttaatagtgaatacatcaaacatctcatggacgatgaagaattccacgatcacatcgaatttcacgctgtgcgacagcgcatacccggcgcacgccaatatatcttgcgtctcgtcaatattcagccgtaaggcaatggccagtgccaaaaccgttttcttgctgggcatatagccatcgccacagcgaattttagagaacagtttacgattgatattcgctcgtttatatacctccacgtcggaatatcctttggcgtcgataagcctcaagagaatgatgttaaaaggttcatccagattggagagcaccgcatcatccacatgcccggcggatttcggcgatggagctgccgacggcgccgagtagacaggcgtttcacccatatcgcccaggaaatccggcatgtccaagacgccggaaggtacggccctatccgccttcggcttattatccgaaaaccgttggagagcaagcagctcatacgttctgcttcctagcgtatcttcatgctccgctacataataatcatcaatatatgcgcgaagacgtttgtcaatactgctgcttatttcgaaagcggttttgtcgaatacgcataggtatacgtcgagatcgtgtccggagtcggctgcgtcgcccaggaatcggcgaatctcatcgagggccacatgaagggcctcggctttcggatatccatagataccgctggaaatcaaggggaaggcgatgctggcacacccctgccgtgccgcgagttccatcgaattgcgatagcacgaacgcagcagacgttcttcatcatgcttgccgtctcgccatatcgggcctgcggtatgaatcacatagcgtgatggcaaattgaatcccggagtgataaccgcctcaccggtatgaatgggagcaaaccgatcgcaggcagcagccatgcgcgagactcccgcagcgcggaatatcgcgccgcacactcccccacccatggcgagctgcgtgtttgccgcattgactatggcgtccaccttcatcttcgtaatatcctgtcggaccaattccagcggcatatatcctccctgattacggcgtagcataatagcctctacacatcgtgcaatcggcagccctgaactaagtctaaatcgtttcttccccgcaagttcgtccaactgacatatccgacacgagagaatagcgggaaaacaaggaatcaacggagcaataacagaaagccgctcagccttactttcgtaaagccaagcggcttgtttccgccgaagcggattggtggaggcgcggggaattgaaccccggtccgatgaccgagcccacagtcttctacgtgcgtagtctgctggccaagttggcgatttttctgcccccatcgatgtcgcagacaactgatggcgagcatatccgcagttaaagtcccgatgcagccctgaggctcaactgcatcagcaagtcttctaaacgacgctcagcatcctcccaaagacgaggaggagtgaacggagcggctgctcactggttaatcctgactaaaaatcaggcagcgagagcgaactcagtgcggttagatttagcacttattcttttgccggggtcatccacgagcggacccggcgttctcggcacgcttccctgcagcgaacaggtcaccgtcgaaaccgatcgcccccaatcttgagttatcaagcttccggcttttcggccggacttttcagcatacaccctatggcgctactcgcgcaaatcgccagcagcgaacatcgccccggaaccaacgaagccaacgaaatcgccgtcacttgacgatgggcttctgggatgaggaaacatcaatctgatgtttcccggcaaagccagccgtgccagcggtgatgttcttgtcgatttcctcgacttccgccaacttcagcttcagttgcgaagagtcgccccaaatgattacgcggtcaccgtcgttaagcgtggtagtcaccgaatcctgcgtctcagcggtgaccttggtaatggacttacgcatcgattccggcaacgcgcccagaatcgtcagcgtctccttcaccgaacggttcttgagactggcgtctatatccttgacctcgatcaccgggatgccatccacgttggcgttcttcaccgagttcaacacacgcgcctgggaatccaccgcggtcagggtatcgcctcttttcagcatggccgcgggccgttgcgccttgacttccacgctcatcgacttggggaactgtttggagaccttggcctcgctgacgccgggaatggacttgagttgctctgtgacctcatgggcggagaccaggaacaacgactttccagcctgcttatcggcgatgacatggatggtctgcgcactcacccattcgttggcaccggatacgccgatctcgctggtttccagacgaaacaccgacgagaaaagcagcagccatgccagccccgccactacagccacactgacgaccgcaatcaacacgcgtaacgcaacgacgcgcacgtttgcacgcttgcgttctttggcgcgttcggtgaaattcaccactttcgggcgtgatgcgactcctagggagccggtggtctgatgcagcgtttcggcaacgtaatcctcgctgtgcaaccgccgtgcatcgacgaaggcaccggcctggcccttggctaccgtcacatcgtcgatgatctccggcttgtcgatctcatgcccggaagacacggaccggggagcgcgagacttcgacgagcgacccgtgtttccgcgtgaaccgatggtgcgcggcttgcgggaactcccagacgaacgacgtgagccgttgtcattgcccccggatctgaccgtgcgcccggacatcactcgcagctttcccgatgggcctcaagtgcggtgagcagcacctgatccatgtcggtgatgtcgcccgcgcccacggtgaagatcacgtcgccgtggtgggcgcgcatggccatcatcttggcggccaggcacatatcctcgaccggctgaatccacgtgcctgcggaagaatccttgagtcccgcagccgcgtccacgatggtggaggggctgatgtccgggaaatcggcctgcttttcacgggccgggaagataccggtgataatgacgtcatcggctttggccaaggatttggcgaactggtgcgcgaagaacttggtgcgggagaacaggtgtggctggaagatcacacgaatggtcgaatcggggtaccggcgtcgggccgcatccagcagggccgcgatttcggtgggatggtgggcgtaatcgtccactacagtgacctgcttgaccgtgccgcgcacctggaagcggcgtgccgcaccgaggaatgtgccggccgcattggccgcgtctgcggggctcacgcccagcagcacggcagcgctgatggcggcggccgcattgcgcgcattgtgcacgccaggaaccttcagggcaacgctctgagacaccggctcccccgccgtcaccgcggccggcagatgcagggtgagctgttcgacgccgctgcctgcggtctcgctttccgaagcgatccagacatacgcggcaccgcccaaatcgggcagggattcacgcgcggtagtgccgtaggcaacggtatgggatttcacgtcggcgggcatggcctccagcacggcaagtccgtcgggatcgtcgatactgataatcacgtgaccggtggcccggccggcgtgggcaacgaacgcggcacggtagtgggcttcgtcgccgtaatggtcgagatgatcggcttcacagttggtgataatggcgatggtcggatggtatttggcgaagctgccgtccgattcatcggcttcggccaccaggatatcgcctttgcccgcgtgtccgccgtccagcgtggtgccgtccgggccttggataaagccgccgatggcgtagcttggatcggcaccggcgttcaccagaatgtgggacagcatggagctggtggtggttttgccgtgcgctccggccacggtgacggctcgtttgccgttcatgagcagggcgaggatgtcactgcgatgcacaatacgcttgcccgccgcgtgtgctgcgacgatttccggattgtccggtttgatggcgctggagtagaccacggtctcggcctgggcgacattttcggctcgctgcccgaattcaacggtgatgcccagcgtttcaagtcggtcggttttggcgctgtgtgcgcgatcggagccgtccaccgcgactccttcggcgtgcagcatttcggccagaacgctcataccggcaccgccgataccgatgaaatgggtggcgccgagatccgcggggcgggccgcagcatcgaatgaggcatacgtggggtcaagcactatgggctgatcttgagacaattcaaaactcctttagggattccagcaccctatattatgaccgtatctcgtgctgcggaacggaattggtcagtatcgcgcacggaatgatatctgaatactacttggatggttcggctaattgcagaacgtgccgggccatgatttcggcagcgtttctgatgccgtattcccatgccttgcggccgaattcggcaagtcgttcgtgatcggcgagcagatcgggcacatgctcatgcacccactgcggggtcaggtccttgtctgcgaccagaaggccgccgccggcgttcaccactggctcggcgttgaaacgctgctcgccgttgccgatgggcagcggcacgtaaatggccggcaggcccagtgcagccagctcggataccgatccggctccggcacggcaaatcaccaagtcggcacaggcaaaggccagatcgattcgttccagatattcggcggtatggtagtcaccttgtccggccgattcggggccgatgccggtaagcacgtccgcgccggccgaggccgtgaccagttcgcgtacttcgctgattttgcctcgcccggtcaagtggatgatttgtgcgtgggccaacaggtctgcggcggaggaggcgatggcacggttcaggctttgcgctcccagcgatccgccagtgaccagcaccagcggacggttcggatcgacgccaagctgcgcggccgattcacggcgtacggcggcacggtcgtcaccgatgcgtttggtcagggaggcgatggccgggcgcaacggcagaccgacgcgctcgacgtcggctccggcacgcggtttgagaccggtgccctcgtacacggtaccgatgaaatcggcccaacgagcgcccagtttattggccatgccggcacgcgcattctgctcatggatggcaatcggaatgcccatcttgtgtgcggtggcgtagacgggggcggaagcatacccgccgaatccggccacgacatccgcatgccgcgtttcaagaatggagcgcaccttggcggtttctcgcttccattttgccgggaagcgcagcatgtacaggttagggcgacgcgggaacggcactttttcgatggtgtcgagctcgtagccggcctccggcaccaaatccttctccaaacccaccgcagtgccgatgacggtgacctgtgccgtgggttcgatgtcgcgaatcgccccggcgaccgcgagcagcggattgacatgtccggcggtaccgccgccagcaagaacgatatgtggtgtgccttgattcatgattaccgagtctacttacgcgctctgacgcgactgttttatctgcggttgagagcgcataagtcccacaaccagtccggccgccgtcaagcacataaccatggatgagccgcctgcggagacgaacggcataggcacgcccaataccgggaacacacccacgaccacgccgatgttgaccatggcctggcccacgatccaaatggcgacgcacatcagcaccatggcaacataacgatcggtgacctgcaatgcgatgacgatcatgcaccaggcgagaatcgcgaagaacagcaatacgatggcgcaaccgacgaatccggtctcctcgccgatgatcgcgaaaatgaaatcgttatgggcggccggcaggtaattccatttctcccgcgaattgccgatgcccaatcccagaaaacctccggaggcgatggcgtacttggcgtgaatggactggtagcatacgctctgcgcgtcagcggccgagcaatcgccatatgtggccagaatacgacgcaagcggttcgggctggaaaccgccaatgcaccgaccataaccaccgcgcccaatacgccgactcccatccatttgccggggaacccgacgatcagaaaggccacgcctccgatgaagaccagaatcatggccgtgccgaggtccctgccgcccatcaccagcgccacgcctatcgcatacagcgccaacggcgcggcatatgctttgattcccttcttgtggtacatcttgctgcaggcatgcaacgacgagggaagccatatgcacatcgcgaacttcatgaattcggccggctggatagtggtgaagccgaggtccagccaacctctgttgccgtagacgtcgtgacccaaaggagtaaaggtcagcgcctgcaacaggcaggcacccaccacaaagaacacgccggtccgtttccagaacgtcaccggcatcatcaatgccacgaagcccagcaccaagccgatcaggcaaaacgcgccctggttcagaagctgaaggaacggcgacttgcccagtgcggccatggtgaccgtggagctggagaacaccatgatcaggccgaagcatgtcagccccaccacggccatgcggaagccgtggtagcaccatagcgggttgagcaagcttcgccaacccgtgtagtcggcgatttcgagtgagggcttgtcaggggctctgtatgccttacgcttatgggtatcagtggaggccatgcacctcgctccacgtcttggctgcggcggcgaatcgattgcctcgatccgcataggacttgaactggtccatggaggcgcaggccggagccataagcacgatgtcgccggcggcggcatacgtgccgcaggcttcgacggcacggtccatgacggtatcgttgtcttcgggatcgatgatggtcaccgggatgtccggagcttggctggcaaacgcttcgatcatcggctgctggtctttgccgatgatgacggccgctttgatggtgtgtgcctggtccttgaccaggtcctcgaatcgactgcccttggccagacctccggcaatccagatcacagacttggccgggaagctggacagcgaggcgcgtgccgcatgaccgttggtggctttggaatcgtccacaaaacgaacagagccgccctcgactgcggcctcagccacggtttcgatgcgatggccgcccggcttgaacgaggtaagcgccttcagcgcggtatcgcgatcagcgccaagtcccagcaccaacgccaatgccgtcaatgcatcggccaccagatgcgggtacagtgagccgtccggctctgccagatgcgtgaaatcggtgatggcggccagtctgaccgactctcccactgcgccgccggccacgccgctcctgtccacgatccagccatcttcaatgccgatctggccggcttgaggggcctcgagcgtgaatcccaccttgcggcatccttcggcagtctgagccgcggccgccagttcgctgactttggcgtcctgcgcattgtagacgatggcgcgtttggcgttgtggaacaccttggatttgtcggcggcgtaattctcgcgcccgccatgccagtcgaggtgatcgtcggcgatattggtgatcgccgcgcagtcaagtgccagcgaatcggtgaagtgcaattggaaggagctcagttccacgcacagtacgtcgtgctgcggattggtggcgcaacgagacaggctcatgctcatgtctccggaggcgatattgccggcggtcggcgcgtcgagtccgcaggcggtgagcatttccgaggtcatctcggtggtggaggttttgccgttggtgccggtgatgccgatccatggagccggagtaccggtgcgctcgttattcacacgcagctgccatgcgaattccacctcgctcatcacagggatgccacggcgttgggcttccagcacgaacggggtgcgggggttgaacaccggggacgacatgacgtagtccacatggtcccagtccacgtcatcaaaggagtggagatcggcctcgggcttcctctcgtcgacgccaatcacgtgggtgccgcgttccctcaatacctccgccaacgaggtgccggacacccccagtccggcgatcaccactgtcttatccgctacttgcattgttcctcctgatataggaattccgtgggtgagcataatccacccagatttccgctagctgaacagcaggccggagcgggtgacccagtcgccgtagaaaatcgtcagggcgagcagcacgaagatgagttcgatcatccagaaccgcaccaccaccttggtttcggtccaaccctccagttcgaaatgatggtgaatcggcgccattttgaatacacgtttgtgggtcatcttgaagtacccgacctggatgacgtcgctcatggcttccatgacgtacagtccgcccagaaccaccgccaggaattcggtgtgcgtggcgatggacagggctgcgaacagaccgcccaaggccagggaaccggtatcacccatgaaaatcgatgcggggttcgagttgtaccacaggaagccgaagcaggcgacggccgcgcatacggcgatgacggtcagatcgagaggatcggacacggcataggaatatccgccatggctgccgcccttgatgtggtagctttcccagaatgcgatgatgccaaaaccagtgaaggcgatcatcgacgaacctgccgccagaccgtcaagtccatccgtcagattcactgcgttggtccatgcggtcatcaggaagttcacccagatgacgaacaggatgatggctacggcacggccggcgaagtcgaagttgaagaacggctgttcgatgaagctgatgcctgcctgcgcactggggaatcccgatttggtgggaatcagcagcgcaagtaccgcgtagatggtggcgaagatgaactggccgatgaacttgccgcccaccgataggccttcgttctgcttcttacgcaccttggcgaagtcgtcgataaagcccagcagacccatcgacagcatggcgaacagtacgagcgccgcggaccaggagggcacgtcgcccgaacgcaggtatcggtacagtgcggaggatgcccaaccgagcagaatcgcgaagttgatgaccacgccgcccaacgtgggggtgccgcgcttgaccagatgcgactgcggcccatcctggcggatgtactggccatagtgcagcttgtggaccagccgaatcagcagcggggtgccgactaaggtgacgatgagcgacaccagcattccaatgatcagagcaatcacgtgcagcttctctttcttgtcggtttcttggggtggttatcaggtcagttctttgcccagcgttcagccaaagcgctcaggcctgacgcgtgcgatcccttgagcagcaccacagcgtcgggatggttgcgagccaagtcgatgaccagctgttcggccgcatcgatgtcgtgtacgcaatccaccgacgcggattggctctgacgggcaccgtccgccagagcctgtgccagtgcatcgagatgttggtcttgggcggaaccgaccgcgatgatcgcgtcgatgcccaattcgtccgcatacgtgccgatcgaggtgtgcaatgccgtttcatcggcgccgagttccagcatggcacccagcagcgccacgcggaacggctccttgccgtcatttgagttccaggccttcaacccgttcaggccggctttcatggagtcgggattggcgttgaaggaatcatcgatcagcgtgaaggaagtcccctcgcgattcaccgtggacaatgccatgcgatgagggctgatggtgtgctgcgaggccagaatccgtgccaccgtttcgggtgccataccgtaacgcatcgccacggttgcggcggccaacgcgttcatcacattgtgacgtccaggaatgcccagatgcaccggcgtatggttgccgtccgcatcgaccaacgtgaattcagcatgatcggaccggtcggcagtgacatcaatggcccgcacctcgggctcctgcgacgatcccaagccgaaccacagcacgtcgccgttggccaggccggccatgggaaccacgtgttcgtcatcggcgttcagtaccgcggtgcctccgggaagcaatccctgcacgatttcgcttttcgcctgtgcgatgcgttcgcgggagccgaattctccaaggtgagcgacgccgaccttcaatacgattgccgtgttcggcggtgcgatacgggtcagtcgcgcgatttcgccgatatggctggcacccatctcagccacgaagaaccgggtgtgctcatcgacccgcaacgcagtgagcggcaggccgatctcattgttgaacgatcccaccggagccacggtcggacctacggtggcaagcagggaggagagcagatccttggtggtggtcttgcccaccgaaccggtcaatccgatgatgtcgaagtcgccgtccagctcgcggcggcgaacgatgttgtatcgggcgagttcgccaagggcgtcgaccgtgtctttcactacgatctgcggaaggccatcggacttcacctcatggtcgacgatggccaccgtggctccctgcccagcggttttcgccacaaagtcatgcccatcgacacgctcgcctcggatggccacaaacaccgatccggggccggcctgccgcgagtcgctgaccgtattggtggctcgagactcggaaccggcgtctccgatcaatcgaccatcgacggccttggcgatctcctccacgctcatcggaaccatggtgtttcaaactcctttacgattacgcttcgtcccgtatccacggacttaattgagattattggccacatgcagggcactgcgtatgttgtttttcctcacgccggcggccagcaccatggcgatggccaaggacatgtgcccgagtcggacgcggtcatacattgccggtgaatccgcagccatttcatccgattcgggtgtcgacgaggtcatggacatgtcatgttccgcaacgaatgcgtagcgtgtcttcaattcgtccaagcttgcgcttgcgttgacatcctccgtgcccagtacatccacgttcaccgattccaacgcatgctcggccaacgtgcggtcatccatggcgatgatcacggccgccacaccgtcttcggcgcacacggacagcgcgcgctgcatatcgaggatgcccagaggatagttcaggttcatggtacgtgtcatcgacgtggacccggatgcggtgattaccgccaccggattgcccagcatgtgcaggaattcggagagctgggacacgcctgcgtcaacggcctgctcatccgcaccggtcaccgcgaacaccgccatggcgttggacggtccgccggccaggccgctggccagatcgccgagtacgcgatcgtcgaaatcgccgtagagcaacggtatatcggcattggcgatctgccctttggacgcgcgtggcagcaacgccgcataggcaccggcctgtgcggcatgcagtacatcgggttcctgctcatgcgtgcagatgaacagcgagccgggaatcacggtgtccacggcatcgctgagtgaggtaatggtgacattggtggcgaagggtggatcgacttcaaaaccgtaccgttcgaccagcattcccaaggtcacccgctgggcgatggattcgctcactgcactcatgggctatcgcctttctcccctgatccttaccacgtgactggaatagcattttttcgtggactggagacaggcacctcgtatttctgcataaggaactcacaaatctgtgcggaaacagggccggccgtcagaccgccgaacacaccattcggatccttcagcaccacggtgaccgcatagcgcgggttgtccgcgggaatcaccacggaataatcggagagaatggacgagagcgcgccatccgagccctgcacctctgcggtaccggacttggcggccatgcggtaaccatcgaccttgacgaacttgttgtagccttccgccactgattccatcgcattcatcatgtccgatgcgaccttttcatccaacacgcgggtggcttcgcccttcttggtctcagtggtcttgccattggcatcggtggttgatctgatgatcgactgctgctgcttgacgcccttgttcgcgatggtggccaccacgttgttgagctgcagggcgttgacggcgtagccctgaccaaacaggatggtgttgcgcgtacgcagatcccatgccgaagggctggtgagcagaccgctcgattcaccgggcaggttcagtccggtcggttgtccgatgccgaatttggtcaggtactcgtagcgttgctcatccggatagttctccccggccatgatcatgccgacgttcgatgagttctgcagaataccggcgagcgtccagcgctcagtgccatggtcgaatgagtccttgtaggtctggcccttctgtgtgatgtggtccgggaccgacaattgatcgctcatcttatgcagtcccgtctgcagatagccggacatggagatgaccttgcccaccgaaccaggctcgaaggtttcggacacggcccgagacgggctcatcttcgccgcatcggtaccagcctgtacttcatcgctatcggccagtgcgagaatctccccgctctggacatcctgcaccacggcgatcgcccacgctgcaccatacttggattcggcctccttcaaggcctttttgacataccattgcacatcacggtcaatggtcagggtgacatcgtcgccatttttggccgccaccgattcggtcatggtgccgggaatctcttcgccgccattaccacgctggtaggtttcatggccatcggttccggtaagcgtcttgttctcgacctgctcgatgccggcgacgccatcgccgttgtcgttcacgccgccaagcagcgcgcccatgagatcaccatccgcatacagtcgttcactgctcagctcaccccagacaataccgcccaggtgcaacgcctcgatgctgcgcttgacctgtggggtcacgtctttcttcagaatcacatactgcccggtaccggacagatcagctcccagttccatggcgttcatatccaggactttggccagcagtcggcccacggccgccgctccggtagcacccacgggtttgccgtcaatttcgtggcagtaatcacgggtgttgtcattgcaagtaatcggctcgaactcctgtgcagcctccggattggcgacgatagtataacgctccacgctttgagcgagcacggagccgttggcgtcgaggatacgaccacgcttggcgctcaacgtcacggtcagggtgcggttagccgtggccgcttgtgcggtttgacggccgccgatgagctgggtggaggccagctgaatcacgcatgccgacgccaccaacgccaatgcggcgccgatggcaatgcatttgaacgcgaaggtcttgaccttggcgaactctacgatgcgacgaatggtgttcactgggttccgcctttgttggactggtatccgcttaagtcgatggacactgatccctgctgcgggaccatgcccatgtcgctggccttgtcgggcaggttcgcgaccaattgatcgagtttggcctgatcgtcttcgatatcttgggtaagtctgttgatattggtttcgatctgtgccgcctcaaacgagttctgcaccatctgggtacgcagcatcagcgcgccgaacaaggtgccgacgaggaagatcactgcgatggccacatgcaccagcggtgcgcttcttgttctggtccattcgatgacccgtccgacgacattgccccgctcgtctccacgcgggttggagaccacccgcagctcaggtcgggaggaggactgatgcttggtgtgcggccggttcgaggccggagccgcgttcgaccgaatgttacgtgcggatgccatatgccgttatcccctccttgtacgaattcgtgccgtgtttttggctctgcccggagacgcggagccttgtatcttgatgtcattcaggccctgcgcggtttgcgtaaagcgtttcctccatcgtgacggaatatcacggctgacttccaccgcccgcaaccgcaccgaagccgatctcgggttggctgcgatttcatgttcgtcggccttgatggcacctcgcgtgagatccgtgaaaaacggttgggcatccggcggtatgacaggcagaccagccggaacatccactcgcagcccttgtgccatgaacgatttgacggttttgtcttcgagcgaatgataggactccaccaccagtcgtcccccgacatgcagtcggttcgcggcctgcggcaatgtggaggcgagcttgtccaattcgccgttgacttcaatgcgcaacgcctggaagacgcgtttggcgggattgcccgccgggcggtgggcttgcggcaccacttcatcgaccagacggttgagctgtgcggtggtggtaaacggctccttgtctcgacgtgccacgatggcgcgggcgatctgacgcgagaaacgctcttcaccgtattccttgaatatacggaccagttccgccgcatcataggtggcaagaatccgttcggccgtcaacggctggctgacgtccatgcgcatatccagcggcgcatcatgcgaataggagaagccacgatcggtttcgtcgatctgcaggctggataatcccagatccatgaatacggcgtccacacgttctatgcctcggtccgtcaacacctgatcgagctgatcgaaggcggcatgcaccgggatgaatcgatcggcgagcccctcccgttccatgcgttcggtggccagccccagcgcttcactgtcacggtcaatgccgatgagccgagcctgcggcgcggctttgaggaaggcgatggaatggccggcaaggcccagggtgcaatccgctgcgatggcgttctcatgttccagggcaggcgccatcaggttcacgcaatcgtccagcaataccggcagatgaatattcgccacatcaaccatcagaattccacctccggcaacacatcgtcagcaatatcggaatatccctcttccttctcggcgaggtaggactcccacgtatccttattccacagttcggcacgggtgccaacgccgatcaccacgacgtcggaacccagattggcgtaatcgcgcagcatctgcggcaccagcacgcggccctgcttgtccggctgctgatcgacggcaccggaaaggaacacacgcaggtattcgcgggcggctttgtttcccaccgacacacgctgaatctgcgaggcgatacggcgaaattcatcgaacggcagcaggtacacgcaccgttcctggcctcgggccatgaccaggccctgccccagctgggagcggaatttggccgggagcgccatacggcctttggcgtcgatcttcggcgtatatgtgccgagaagcagcggcggcagaccagccatgagatcagccatagtggtggagccttgtgcgttggcatcagcgtcgcgaatcgtctgatcggcaaccatggctccacctccttcatcgttacgtgggatacacttcggccaactggttcaccactctaccccacgattccccatttctccccactcatgcacgatttgctcacccttttagggcaattaccgatggattgcgcgtgtcggccacgactgtcgcacgaatgggcgctccgcacatccaatccacgttgcgcactccaccgaccgagcagcatggcgaattcacgctgaattcacctattccgggttgtccgcatcactgacgtagggggtgtgcggtaaatttgaatgccttaagtttttctgccccacggaaatggaacgaagagaacagcatgtcgagttacgcctcccagctgcatgaggagcagcaggccgtcgatcgcgcctatggacgattggatgatctgcgagccgaaatgtggcaacgcctggacaccgtacgcgccgccggctcccacggatcccccacgcaacgcagcgaacgagactcctttgccacaatgtacgaaaaccgcctcacgcaattgcgcagcgttgaggatcggctggtgtttggtcgtctcgacgccaagaacggcgaccgtcattacatcggccgcatcggcctgtcgagcccggaccatgagccgattctgaccgactggcgtgccgaagccgcacgtcctttctatgaggcgaccccctccaatcacggcgacatcgtgatgcgcaggcatatcaccttgagtttccgcgaagtcgtgggcgttgaggatgaggtgctcgacgtgcattccgaccaagtcggccaggcgtcttccgccggcacgttgaccggcgagggtgcgctgctggcttcgctgagctcacgccgcaccggcaagatgaccgatatcgtggccaccattcaggccgagcaggaccgcatcatccgctccgacatgaatcgtgccgtggtggtgcagggcggtcccggcaccggcaagacggccgtggcgctccatcgcaccgcctacctgctgtacacgcaccggcgcacgctggaacgttccggcgtgctggttgttggccccagctcggcgttcctgcactacatcgatcaggtgctgccctccttgggcgagaccggcgtggtctcacgcaccatcagcgatctgattcccggcatcaccgccacggcggtcgactccccttatgcagccaagctcaagggcgatcgacgcatgacctccgtagtggccaatgccatcgccgcgcgcgtgcgtgttcccgctgttctgccgacagtaaccattagcggcattcaggtaccaatgctggccactgatatcgagcaggcgcaggcggacgcgaagcgcacccggcaacctcataacaaggcccgcgagacctttatccgttcgatgctgaccagcatgcagaaccgttatgccgaacagcttgattacacgccggatcaggcggagctgaaccgcgcgatgtcgttgctgcgtatgaacgagcaggtgcgcaagaccctgaacctgtgctggctgccgatgaccgccccatggctcatcgatcagctgttcgcccatcccgaacgtctgaagtctctggctggttggctgaccgacaacgacatcgcggcacttgcccgccccaagggctccccgctgacccgctccgatattccgctgctcgacgaagcgatggatatgctgggccccgatcccaagacggtggcccgccagtccgccgccgacgcacgtcgtgccgccgaagagcagtatgccaaagacacgctggccgcgaccggtctgggtggaggcatcgtctccagtcagatgctgctcgaccagatgaacggggacgacgccgagctgaccgcgcagcgggccgcggccgaccgtgaatggacctacgggcacatcgtggtcgacgaagcgcaggaactgaccgccatggactggcgtatgttgatccgccgttgcccctcccgctcgttcaccatcgtgggcgatgtggcgcagacctcggcgctgggtggcacccgacgctggagcaaatcgatgaaccgcctgttcggcgaaagccactgggatctgaacgagttgaccatcaactaccgtaatccgcaggaagtttccgaacttgcctcacgatttgccgagaaggaaggcctctacatctccacggtcaatgcggtgcgcaccatccccgattcggtgtcccgcaatgtggtgcccgacatgtcgtccttgctggaaacgacggccgagcgggcggcgcagcttgccgaacaattcgtttcggcagacggcaccggccgcatcgccgtcatctgtccggatgatctcatcgccccggtgcgcgacgccgtgcgccgcaaactggccgccgttcttgacccggccgaatacgcaaggctcatcgagcagcccgaatgggatgagcaaatcagcgtctgcggcaccgaaacggtcaagggtctggagttcgatgccgtcgtggtggtcgagcccggtctcatcgaggatgacgcgccgagccgcctggtcgccgcctcggacctgtacgtggcaatgaccaggccgacccagaaactggttatagttcggacaaaagcggacgaaaagtccctgaacatctaaggtatgaagcatgcccaaagcactgttattggaaaacattcaccccgatgcggccaaatcgctgcgtgatcacggtttcgaagtcgagaccatgaaaggagccctgagcgaggacgaactcatcgatgcgctggatggcgtggacttggtgggcgtacgctccaagaccaacgttacagcccgcgtgctggatgcgcgtcctacgctaagcgccatcggctgcttctgcatcggcaccaatcaggtcgatctggcacatgccggcaagcgtggcatcgccgtgttcaacgctccctactccaacacccgttccgtggtggaattggtgatctgcgacatcatctgcttgatgcgccgcattcccgcacacacgcatcacatcaagcatggcctgtgggacaagtccgcttccggctcgcatgaagtgcgaggcaagaccctcggcatcatcggctacggcaacatcggctcccagctgtcggtactggccgaggccctcggcatgcgcgtggtgttctacgacattgaggagaaactggcactgggcaacgcctaccgttgcgacaccctcaacgaactgctggaacagtccgatgccgtgaccctgcacgtggatggccgcaagtcgaacaccggattcttcggcgaagaccaattcgcccacatgaagcaggacgcgattttcattaacctttcgcgcggtttcgtcgccgatctgggagctctgaagcagcacctcgattccggccatctgtctggcgcggcggtcgacgtgttccccgttgaaccgaagaagagcggagatccgttcgagacctcactggccaatgaagacaatatgattctgactcctcatattggcggctccaccttggaagctcaggaatccatcggccatttcgtctctcagcgtcttgaggattactggttcaagggttctacctccttgtccgtgaacctaccgcagatcaacctcggtgagtgcaagggtgtgtgccgtatcgcccatctgcacgacaatcttcctggtgtgctggctcatgtcaatcatgtgctcggcgaggagaacatcaacgtttccttccagtcgctggcaaccgaaggcgaacttggctatgtggtcaccgacgtggctcagaagcccagcgccgccacgcttgaagcactgcgcaacatcgaaggcaccattcgcatgcgtgtcatcagctgacgcagctcatcctcgattgatatgaaagagacccgtcatcatgacgggtctctttcataagtgctgggcttcatgattggctcgcaccatggtttgcgaatcactcgcatatcacggtgcatggcattcgcatattattcacgcaaaccatcaatggcgctttggaaatcctccagacctgcaaagttctggtacacactcgcgaatcgaaggtacgccaccacatccaagtcacgcaacggtttcaggatggctttgcccacttcatctgaggtgacttcggcaaggcctcgggagcgaaggtcctcttcgactttctgtcccagcagcttcagatcctcttctctgaccggccgcccctgacaagctttgcgtacgccggaaatcactttgtctctactgaatggctccacgccacccgaacgtttagtgaccagcagcatactggtttccaccgtggtaaaacgcttgctgcatttcgggcatacgcgacgccgacggatggaatgaccgtcatcgctaatgcgcgtatcaatgactttggtgtcggggttctggcaaaaaggacaatgcatgctccccagaataacgtgtacgggcggaaaaaccatgccgctcgggtttcatttactcaaccggaacaataatgcgctgcccggcctgcaatgatccggactcaagattgttcaacgcaatcagctcatccaccgtttccgatacatcatgaccagcaggcgtgatagccgaagcatatgaccagagcgtatcccccggccgcacgatataaccggtcacctgcgtggcccccgtatccgattgggcccgctgaacggtaagcgcgccgaaaccacaccaggccagcgccaaggcgaccatcactgcgataatcttcccacgcgcattccggcgggacgttccagcatgctgcatagctacacgtgcgctacgggccggggccatcaccattgaaccagtcatcacgaccacctctctcgaacagatgttctatcgaacaactgttcttataatggcacaaacgttcgacacggtcaagtcgaaactcgaacagatgtttgatttcacacgaacaacacgttatgctggtgacataacgaaaggagccctgacgtgagcaccattcccttctcccccaagcagaagccggacgagtccaccctgaccgaccgccagcgcaaagtgttggacgccattcgcacgcatatcgacgaacaaggcttcgctccctctttccgggaaatcggaaatgccgccgggctcaaaagtccgtcttcggtcaagcatcagctacaagttttggaagacaagggcttcatccgcatgaacgcgaacaagggtcgagccatcgaggtggtggcaggatccgccccgaatgccgaaaagccctcccaagccagcgaagaggcaaccagcaccagtaatgtggcggagatataccaattccccgccgaagccattgccgaatcacacgatgtgccgctcgttggccgtattgccgccggcgtgccaattaccgccgaacagcatgtggacgacgtcatgcgtctgccggaacggctgaccggctccggcaccctgttcatgctggaagtccacggcgattccatggtggatgccgctatctgcgatggcgactatgtggtggtgcgcgaacagaattccgccgtcaacggagatatcgtcgccgctctgctggatgacgaggccacggtgaagaccttccgcaaggaaaacggccatgtctggctgatgccgcacaaccccgcatactcgcccatcgacggcacacatgccacgattatgggcaaggtggtcaccgtgctgcgcaaattgtagcctgttcgccaccagctgatcagcgtgcaccgaatcgcgccggtcgtgctatagtcacgcacagcttacggaaccccggcctcgcgccggggtttcgtcgtattcagaccatatcgcaaatggtattgagaagcggtttcaactcgatagagcgaaggagtacatatggctcatacccatgcacccgcaccatccacatccataaaccctgccgcgcaccagcgtaggctgattgccacgttgaccgtaaccggttcggtcttcctcatcgaaatggtgtcggctgtcttaaccggctcattggccctgctggtggatgccggtcatatgctcaccgacatgtccgtgctggcggcatccacaatcaccgccatactgatgcgccgcaagcccagcaacactcgtacttggggctgggccaggcttgaggtgctcaccgctgccgcaggtgccgtggtgctgctcatcgttggcatctatgcgttggtggaggccggcatgcgtctgttcggcagttccaaagcggaaatcgacgatatcggcttgctgctgttcgcgggcattctgggtcttgccgcaaatatcatctcgattttcatccttgcctcgcagcgcgaagacaacatgaatatgaaggccgcgttcctcgaggtgatgaatgacgcacttggctcggtggccgtggtggcctctgccctggtaatgatccccaccggatggaatggcttcgacgccgtggccggtgccgtcatcgcactgatgatgattccgcgcgccatcaagttgctgcacaacgcggtcaaggtgctgctggaggaaacaccggatggacttgacctcgataaggtacgcgaacatctggaagacgtgccgcatgtgcttgccgtgcatgacctccacgccagcacggtgtccaccggcatgccgattctgatggcccacgtggtagttgacaaagacctcaccatggaagatgccgccacaatcctcacccaactgcaggattgcctgcgcgagcacttcccggtctcggtcccccacaccaccttccagctcgagcccgagggctatagctccccctcctccaacgaactccacgaataaaaaatgctcccaacgggagcattcagcagggtataaaaaatcgctgtacgtgtgcgattttcgtgccgcacaagttgaaggcctacaaaggtaggtcgagtcttgtgcggtgcgaaaggcgctccgtacagcgattttttatcagaagccgaactgggcggcggtttccttcagcgtctcggcagagcgcttcagagcggcgagctccttgtcggagaccggggtgttgatggtgttgttgacgccctgacggttgaggagggtcggcacggacatgcagatgtcggagatgccgtggaagtccttgagcatggagctcacgggcaggatgcggttggtgtcgtgcaggacggcttcgatgatgtcgacgccggacatgccgatggcgtagttggtggcacccttaccgttgatgatcttgtaagcggcgttcttgacttcctggtggatctcctcgcgcttgtcggcgtcgagcggatcgtggccgggcagcggggtccagtcgcacatggggacgccaccgatggtggcggactcccacagcgggacttcggagtcgccgtgctcgccggcgatgtaggcgtgcacgttcttgacgttgacgccggtctgctgggcaatcaggaagcgcagacgagcggagtccaggttggtgccggaaccgaagatctggttctcgggcagaccggtgagcttctgagccacgtgggtagcgatgtcgaccgggttggtgatgagcatgtagatggcgttcggagccaccttgaccaggttcggcatgatggccttgaggatgttgacggtagcgccaacgagctcaagacgagactgacccggcttctgacgcggaccagcggtgatgacgaccatgttggcgtcgcggcagatctcaggatcgtcggaaccgtcgatggacacggtcgggtagaagctggagccatgctgcatgtcgagcacttcggcttccacgcgctccttggcgatgtcttcaagcacgatctcgcgagcgatgccacgctgggcagcggcgaaggcgagggtggagccaacggcaccggcaccaataacagcaagcttcgtgggcttaacggtagtttccgccatgatggatgaacctctcttcaaaggcggtctgctgatgaatggcaggccttgtaactaacgtcttcactctataaacccgctaagacgttttgctaccagcacaccaccctgtttgataaccgtatggtaatgttttcaacggttgttagcgctcacgaatatactgtgatgtttatcacgttagtcaatggactgttcgaccacctgagcggcaagatgggcgtcaacgtccgcttcaagctgtatgccatcatcgcggtactccaccttgtctaccttgccgtattcgcgtacacgagagatcagggagccagcggtatacggcagcagagcgttgacatgcacatgcgggaccggcagcagactttcgaccgcggtacgcagctcgtccaatccctcaccggtataggcggagacgatgaacgcatccggctgcagtgcggcgagtcgttcacgtgtcgcctcgtccgcctgatcggccttgttgaatacgagaatacgcggaatcgaggccgtgccttcgatgtccgccaacacgtcattgaccgcgtcgacctgagagaacgggtcagggtgggagccatcgaccacgtgcaggatcacgtcggcctcggccacctcttccagggtggatttgaacgcctcgatcagctgggtgggcaggcggcgcacgaagccgaccgtgtccacgtaggcgtaagcgcgtccgtcgcgggttttggcgcggcgcacggccgtgtccaatgtggcgaacagcgcgttttccaccagttcggccgaaccggtcagacggttggtcaacgaggatttgccggcgttcgtgtagccgaccacggccactgtgggcaggccgaagcgacggcgtgaaccgcgcttgacctcacgtgccggggccatctcacgaatctgacggcgcagtctggcgatacgcgtgcgaattacacgacggtccatttcgattttggtctcgcccgggcctcgcgatccgatgcccgcatccgcgcctgccgcgcgaccgccggcctgacgggacagcgaaccaccccaaccacgcagtcggggcagcatgtattcgagctgcgccaactccacctgcgccttaccttcacgcgaggtggcgtgctgggcgaagatgtccagaatcaccgcggtgcgatccaccaccttgactttggctgcgtcctccaatgcacggcgctgtgacggcggcaggtcgtcgtccacgataatcgtatcggcttcctcacgcgccacgatgtcggcaatctccttggctttgccggaaccaacgtacgtggctgcatccggcttggagcgatgctgcagcaaaccatcgcataccaccgcgccggcggtttcggcgagcgccgccaactccctcaacgattcctcggccttggcttgcgtggtgacggcggacgaccagacgccgacgagcaccacacgttccagacgcaccttgcggtattcgacttcggtgacgtcctgcagctcgccgagaccggcgacatgcttgagctcgttgcgggcctcgcgctcctcccattcctggttggcgtcctcgtgccagccggtcgcgcgctggctgtcgtcgagcagcacttcggactgcccggccagcacaccttcaggggtaacgtcgttgttgccgcggtcgatgtcggtgtactgggtgttgtcggtcaagtgcgcctcgtttggttggaatggttcacgattcttctatggtcctttattatcatcacatgaggtgacatgctggcatagatcggcacgtaccggcataggccggctgatacaggtcggcatacgagagcggcgaatcccgcagaaatggagcgaccatggcagaacagtatttctctgcggaacccgcatcgaaggatgtgcgccgcacattgaacgtaacgttgcgcggccatgaggcgaccgctcaggtgtcgaacggcgtgttctccggctctcgcgtggacctcggtacgtcggtattgctgaagcatgcgcccgagccgccgcttaccggcgattttctggatttgggctgcggctggggccctatcgccctgacattggcgtttgagtcgcccgaagcgaacgtgtgggcggtggatgtcaacgagcgcgcggtggacctgacccatgccaacgcacaggcgaacggccacacgaacattcatacggctcaggtggacgagtccagcactcccctgcctgccgagaaccagccggcgttctgcgagacggtgccgagcgacctcacgtttgatgtgatttggtcgaacccaccgatccgagtcggcaaggaagcgctgcatacattgcttatggcttggctgccgaagctcaaggtgggcggtgccgcctatctcgtagtgcagaagaatctcggttccgattcgctgatcccctggctggacgatgcgctcggcgaggggttcactgcgagcaaatacgcgagctccaagggcttccgtatcattgaagttcgtcatgaaatatgagtatcccgcagaacttcccgtatctgccgcgcgtgatgagatagccagcgcggtcaaacgttcccaagtcgttattgtgtccggccagaccggttcgggcaaaaccacacagctgccgaaaatcctgcttgagcttggccgtggcacgcacggcaagcagatcgtgcacacccagcctcgccgtatcgccgcacgcacggtggccgaacgtatcgcctcggagatgggcgtgaagctcggtgacgaggttggctatcaggtgcgtttcaccgacgaaagctcgcccggcacacgattgagggtcgtgaccgacggtattctgctcgcccagatccagcgcgatccgaaactcacccgatacgatacgatcatcatcgacgaggcgcatgagcgcagtcttaacatcgactttctgctcggctatctgacggcactgctgcctcagcgccgcgatctgaagctcatcattacctccgcgaccatcgattcggtcaagttccaggagcatttcgagcacgccttgcatgagaaggtgccggtaatcgaggtttccggccgcaccttccccgtgcaggtggtctacgagccgcttggcaccgcgcccgcgttgatgcgcgaagtgccgggattcgcggtgggcgcccgccccggcgacgccgattacgacgagctggccagcgccatcgcggaatccgattccgaccggccccgcggccggtccggtgcctcctatgccgatgacggcatcaccgatatacctaccgccgtggctcgagcctgcgccgagctggtgattcactcctcccacgagcgcggtccccgcgatattctggtcttcgcctccggcgagcgcgacatccacgagttcgaggccgcactgcggcatcattacggcccgcgcgccgacgacatgcgccggccggatgccatcgagatcatgccgctgttcgcgcgactgtccgccgccgaccagcataaggtgtttgaatcgcaccttcaccagcgcatcgtcattgccaccaatgtggctgagacctcgctgaccgtgcccggtatccggtatgtggtggaccccggttccgcccgtatctcccggtattcgaagaccgcaaaggttcagcgtctgccgatcgagccgatcagccaggccagtgccgaccagaggtccggccgatgcggccgcgtggccgacggtatcgcgatccgcctgtattcgcgtgaggattacgaaacccgaccgcgcttcaccgagccggaaatcctgcgtacctcgctgggtgccgtggtactccacatgctgtcggtgggcgtggcccgcacggccgaggacgtcacgaacttcgggttcatcgatccgccggatatgaaggccgtgtcggacggtttcaatgagctcaccgagctcaaggccatcggccgcaagcgcggcgaggtgacgctcacccataccggccgtcagctggcgcgcatccccatcgacgtgcgtctgggacgtatggttatcgaggccgcgaaaaccggttcgccgaatcttctggcccaggtgctcgtggtcgtggcgttcctgagcttgcaggacccacgtgaacgcccggacgacaagcgtgaggatgccgaccgcatccacaaccggtatgcggatgagacctccgacttcctgacggccctgaatatctgggaccgcgtgttccaagcagacggcgacccgagcaacaacgcgctgcgccgtatctgcaaaaccgagtatttcagctggctgaggatgcgccagtggaaagatctcgtctcccagctacgccagatgtgcaaggagctgaagttcaaggtcggcgacccgctgcccgcctcccgcccaggcttggagatccgccagctgccgttgaatcagcaggccgcgcattcgctgtgctgcgcgtgggatgcggacggcatccacaagtcgatgctcgccggattgctgtcgatgatgggcatgcaggtggtgcgcgagcccaaggcctccgatttcgcggggctgaccggttcggcgcgcgcccgtgcgatgaaacgcgcccagaagcagtcgaagaacgattatcagggcgcacgcggcacccgtttcgccctgttccccgcttccgccgtggccaagaagaccccgtcatgggtgatgagcaccgaactggtggaaacctctcgcctgtgggcccgctattcggcggccatcgaccccgcgtgggccgaaccgttggccggccaattgacccgcaccacgtatgcggagccgcactggtcgggttcgcgtggctcggctgtggccaccgcgcgcgtgctgctgtatggtctgccgatcgtacaggaccgtgccgtgcagtggggacgcatcaatccacttgaggcgcgcgacttcctgattcgccagggtctggtcgagggcgatattcagcagcgtttcagttacgacgacttcgtgggcaaaaaccgcgacattctcgaggatgccgccgatgatgcgagccgcacccgccagctggcggataccgtgtccgacgaggatctgttcgacttctacaacgcggtcattcccaacgatgtgaccagcgtggccgatctggcgaaatggtggaagtccgagcatgaccgtcagccgaatctgcttgatttcgacccggccaaggtggagcgtctggcatccagcgattcggtgagtctggacgattaccccgaccattggcatacgaccggatcggacggccaacccatcgacctgcgtctgagctacgtgtacgatccggccgacccggccgacggcgtcaccgtgcatgtgccgttgaaggcgctctcgcgtatcacgcccgaccagttcacatggaatgtgccgggtctgttggatgagctgatcctgtcgatgatcaaggcgctacccaagcagctgcgcgtccagttcgtgccagccccggatgccgcgcgtgcgattcgtgactggatcgacgagcattacccggatctgccgggctcgggctcgcagcagaagccgaatctgccgccggtggatgaggatggcacgaccgttggctggcccgatctggcacatgtgttcaccaaggcggccatcgccaccaagggtgcgcagattcatcccgaagtgttggggccggaactggtcgagcgtctttccccgtatctcagggtcacgttctcggtggagcagcaactgccggccggcaagcaccctcgtggacgccggcatgcgcgcggccccatcaaggtgctgggtgtgtccaaggatctgaaggcgctgcaacgcaagttcgccgcgcaggcggaggcgtcggcccgtcaaatggtcaagaagcaggccgatcaggctggagaacagggcaagctggtcagtcaggcgaacctgttgcataaggcgggtgccaccaccgagtcccgggccacgatgctctggcgtggcgcattggatgcgctgcggttgccggccgaacgcatttcgtcgcgctggctgggtaccgaggcgttgatgctggcttctgctccgtacaagtccaccaaggatctggtcgaagacctgcagctggccacggtcaaacggctgatgccgaatgtcgacaggctctcggacgatgaggcgttagccaatgcggtgctcgatgtgcgcgaagtgtacgaggacaccgtctatcaggtggcgcatgacgtgatcgccgtgctcaaggcttatgccgaagtcgacaaggccactggcggcaaggctgatctgccgatgctttcggtgttgcagtcgattcgcgaccatatcgccacgctcgtctaccccggattcatcgggcgcactcccccggatgcgctgaagtcgttgagccgatatttgagagccgatctgagccgactcaataaggcgaaaaccgataagaaccgtgacgtcaagtgggcttggcaggccgacgaggcccgtcaggtggtcgataaggcgttggcccgtgccaaggcggagccggccggcccgaagcatgaggcattgatgaagcaggccgaacaggcccgttggatgcttgaagagttctacgtgtccctatgggcgcaggagcttggcaccaaggggccggcttcgctcaaccgtatcaagaaagcgctggcgtgaccggacggcaaacaagtcgccaggccacgcgccagcgcacgcacaagccgtcatcacagcgtgggcaagtgcgcggacgcctcggcaatcggaaaaggaaacgcaatcgtaggcacggtccgatcaatgctctgaagcgttcctggcgtaaggcgaactggccgacccgcatcaagatggggctgattcccacggtggcggtggtcgttgtcgtagcgctggtggccgagctggttcgtttcacaaactggcgggcacaggttcgcgcagccgaggcggcacagctggaactgacgcgaacatacgatttcaatccgggcaatattatttcggatggtcagttcttcaacggttcggcgatgagtcaggccgaagtccaatcgtttttggacacacaaggcggctcgctggccgcgatgaccttcgacacatcgaacgagtcaggcgaaggcctgtgcacggactatacaggcaccaaaggcgagtcggcggcggcaatcatcgaccagtcggcccgcgcctgcaaggtgagccagaaagtactgctcaccgtgatgcagaaggagcagcatctggtcactgccgtcgatcccagcgactatcagcttatggcggcgatggggttgaactgtccggataccgccgactgcgatcccacctatgccggattctttcggcaggtgtatggcgcggccaagcggtaccgttactatctcgagcacgaggaacagtacgggtatacggcgcacaatctcaactacatccaatatcatccgaacgcggcatgcggcggcgcacaagtgtatatcgagaacaaggcgaccgccctgctctacatctatacgccctaccagccgaacatcgccgcactggccgccggcaacggtaccggcgattcctgctccagttatggcaaccgcaacttcgcgcttatctacaccagctggttcggttcgccgcgaagtttataacggcagccgaccgatcttgtccgattggactcggccaacactgtcagcgttcgacgtatggacgcagcagggtcgtgatgccaaccgccagcagcgaggcgaaagccagcagacacaggcagacggcctacacgcagtagatcggtcgaatgtgggtcaatggttccacgccatgacctttgtccgccagcttgccgccgtacaggttgctccacaggcaggcgcagccgtaaatcaccaagccgatgctgatatagcgttcgggcacgccgatttcgtcgcgcatgatcggcgaaagatacgtgtagaagacgtaggaggcggctgcgccgaagaccacatccgccacaccgagctggatgcggcggtcgaagaacaggcggaattgcctcaggaaaccgatcttcgccggatgcgagctacgtggcagagacactgccatcgatgccatcagcacggcggtgagcaccgaaaccaaggcaaaggtgacacgccaaccaaaggtatcggccacccaagtgccggccggtgcgcgcggtgttcgcaggtgcgttcgtcatgggtgctttcttgagtgctctcgctcgtactacaagctgattcgtcggttacgtcaatcgttttttcgtatcaactcagcgataacacttttcccgcctctgcccgctacccaccaccacgacacgccatagaaaaccccgccgatgaccaatcatcgacggggttcggcacatgtgcaacgcttgcgattacagcttcggcagatacttcttcagctcgtaaggcgtgacctgctggttgtactcctcccattcctggtgcttgttgtccaggaagtagccgaaggcgtgttcgccgagcacgtcggccacgaagtcggatttctccatgatcttcagcgcctcgtccagcgagcgcggcagcggctgaatgcccatagcctgacgttcgccgtcggtgagctcccacacgtcatcactggtaggctcgcccaactgcatctgcttatcgataccgtcgagaccggcggccagcagcaccgagtaggcaaggtatgggttggccaccgggtcgagcgcacggaactccatgcgcgcggagttgcccttgcccggcttgtactgcgggatacgcagcagcgcggaacggttgttgtggccccagcagatgtagcttggtgcctcgttaccgccccacaggcgcttgtacgagttgacgtactggtcggtgaccgcgcagatttcggccgcatggtacaggatgccggcggcgaactggcgggcggtcagggacatgttgaactcctgaccggcctcgtagaaggcgttggaatcgccttcgaacaggctcaggtgcgtgtgcatgccggaaccgggcgcgtcggccaggggcttgggcatgaagctggcgtgaatgccacgctccaaggaaatctccttgaccaccgtacggaatgtcatgatgttgtcggccatggtgagcgcgtccgcgtatcgcagatcgatctcgttctggcctggccccgcctcatggtgcgagtattccaccgagatgcccatttgctcgagcatgttcacggtggcacggcggaagtccatgcctgggctgcgcggcacgtggtcgaagtagccgccctcgtcgatcggggtcggggccttggaccagtcgtcctggctttcgaacaggtagaactcgatttccggatgcacgtagaacgtgaagcccttgtccttggctttggcgagcgtgcgcttcaacacgtgacgtggatcgccgagcgaaggctcgccgtccggggtcagaatgtcgcagaacatgcgggcggtaccttgcgggccaccgcgccacggcaggatctggaacgtcgagggatcgggttgaacgatcatatcgtcttcggacacgcgggtcatgccctcgatggcggaaccgtcgaagccgagaccctcctcaaacgcggcttccagttcggccggagcaatcgccacggacttcagtgttcccaacacgtccgtgaaccacagacgaataaagcgcacgtcgcgttcttcgaccgtgcgcagcgcaaactcctgctgtttatccatagtcgcctatcgttccataaccgtgttacgaagggcgttaacatctcactgttcgtcacctgcgagtcgcgagatttcatcaacatgccccggtccgcatgtcaggcatggttcaggcccatgccggcacggcactatggtagtgactatgagcgaagatcatctcaccccatccgccaatccgcccgtcgacgtgaccagctggacgcaggccaccgacccgcgcgaccgttcgcgcgccggcatcgccactcgtaccaaggcgccgctggacgcacatgccatctggaaggtcaaggagggccggcgtgaggcgatcagccttttggaggagcagtccgcgattcgcgtaccggatctgattccgctgcgttacaagcgtatgagcgccagccccttcaccttctaccggggcaccgtgctcatcatgaccaatgacctggcttccacgccagtcactggcattccggtgcagtgcgtgggcgacgcgcatatcggcaatttcggcattttccgctccccttccgcccgtctggtgttcgatatcaatgatttcgacgaaaccgctatcggcccgtgggaatgggatctgaaacgtctcgccgcctcggtggagatctgcggacgcgccaacaaaatcaaggagaaggaccgtcgcgccgccgtggtccagtgcgtacacacgtaccgcacacgcatgaagtggttctccgaaatggattaccttgacgcgtggtacgagcacctggacgtggaggagacgctcgaccgcttcgagaccaccggttccaaacgcagccgtgtgctgcgcgaggcggccatgaaggcgctgctgaaggataacgacgcggcggcggccaaactgtgccgttatgagagcggcaagctcaggttcaaatccaatccgcccgagctggtgccgatcaatcagctggatgattacgccgacttggatgcgttgcaggcacgtatagacacgctgttcgagagctaccggcattccctgtacgacgatcgccgttgggtgttcgatcatttgcgctatcaggacgcggcccgcaaggtggtgggcgtgggctcggtgggccagcgcgcgtggacgtcggtgtggatcgcgcgtgatatcgacgatccgatgatgattcagatgaaggaggccacgtattccgtgctcgagcattactgcggcgcgtcgccgtacgccacgcacggtgagcgcgtggttcaggggcaaaagctgattcagaatacggccgatgtgctgttgggttggtcgagctttatggccgaggatggccgaccgcgcgactattacgtgcgccagttgtggaatggcaaggggtcgattgatatcgacaatctcaacgcttcgggattgagcgatctgtcacgcatgtgcgcatggtcgttggcgcacgcccacgcccgcaccggcgattcgattgcgatcgccaattacatgggtggcaccgacgaattcgatcaggccatcgcctcattcgccgtcagctacgccgaacagaatgatgaagactacgccgtcttcaaaaagctcctcaaatccggcgacctcccttgctgagccgttaagcggacagcccaatgggctgtccgtaggaggggcctgagtgaagcgatagctgagcgaaggtagattaacagtctcgctaaggcgagtcctttgcctacttcgctacttcaagcgcttcctggagcgtgaacgcacgtgcatagagggacttgccgaggatggcagaatcaacaccaatttcagccagttccttgatggcgcgcaaatcgtccagcttggagataccaccggaagccgtgaccttggcgtcggtgcgttcagcgacttcactcagcaattgaatgttcgggccggacatcatgccgtccttagccacgtcggttaccacgtaacgcgagcagcccacggagtcaaggaacttcatggtctcaaacaggtcgccgccttcgcgcgtccagccgcgcgccgccagtgtgtgaccgcgcacatccagaccaacagccacgcggtcgccgtacttcttgatgaccgaggcggtccaatccggattctccaaagcggcggtgccgatgttcactcgggcggcaccggcctcaagggccgcgtccaacgaagcgtcatcgcgcacgccgccggacagttcgatgttcacgcggtcgccgagctcatgaacgatttctcgcagctgatcgcgattgttgcccgtaccgaaagcggcatcaaggtcgaccaggtgaatccattcggcaccggcctcaacccaagtacgggcggcctcgaacggcgaaccgtaatcggtttcggaaccggattcgccttggcgcaggcgcacggccttgccatcgcgtacatcgacggcgggcagcagagtcaacgacataagaagagcctttcttcagttacatatacacaatttgagctccctcgtcagagggagcttcatgcttttttacagcgtggcgatccagttcttgaggagctgggagccagcgtccccggacttttccgggtggaattgcgtggcggacagcgggccgtgttcgtaggcggccacaaagcgcgatcggccgtacgagcaccagctcacgcgttcgggcgaatcgctcagatcgatgtcgaagcgggacgtatccgccggcttcacttccatcgcggcgtaggagtgcacgaagtagaaccgttcgttctccacaccgttgagcagcaccgaatcgggggcggcctcgatcgtgtcccatcccatgtgaggcaccacgtcggcgtccagcaggttcaccgaaccgccgatcagtccgatgcctgcggcatgggcaccgtgctccagaccgtgttcgaacatgatctgctcgcccacgcacacgccgagcaccgggcggccagcgcggatgcgatcatagatcacacggtcgccgtcgaccttcttcagtccttccatacatgcggcgaacgcacccacgcccggcacgactaggccgtcagcctccaacgactgccggtagtcggaggtgagggtggtgtcgacgccaagattggcgagcgcacgcaccatggaacgtacattgccgaaaccgtaatcgaaaacaaccgctgtggtcatctgctctcctatcccctactggtttggttggcgtctattcgatgcgggagccgcgcccgccacgtccgcgcctagtgtggttggcgagaatctgcatcgcctgatcatggtcgagtccagcggaatccaccacttcgaacccttgggtcttgagttgattcagggttacgatgccgagcatcaggtcctcgacgaagcgcggcgtggaggtgaacagcacgggcggcgcgaaactctggccggcctctccctgcacgtacatggccacttcaagcttgtcggcacggttgactgcaagaatcacggccatgccggataccacggtggtcaggtccttggctgcggcttccgggccgtcgccgtccagattcttcagcaccgcgacggccccctgattggcaccgatgcatgcggcggagatgtccgacagctggcagaacgcggccaacagttcggcggaggcaagacgggtaacgatcagcgccaccttcgccttgttacccaacagtccagcgagttcgttgtcgaagccgagcgaggggtcgaccacgtcggccatggcctcgttcaccgcatccgcaacggacccggtgacgtcgtcggtcataggctggccggaatcagcggaagccttatcagccgtatcatcattcgcgtcggaatcggacttcgctgaagcagcgtccgctgttttatcggcatcactggtatcactggcatcgccggataccgaatcgtccgcgaattctttctcgaatccggcgagcgcagcctcaagctcctcgtcggagaagtgcgattcgtccggatcgaacttgtcgtcggtcatcacagggctcccttggtgctgggcacgccgtctacacgcgggtcgatttccacggcgaagcgcagcgcacgggccagcgccttgaattcggcttcagcgatgtggtgcgggtcgcggccggcgagcacctgcatgtgcaggcagatgccggcgtggaaggcgatggattccatgacgtggcggaccagcgagccggtgaaatggccgccgatcatgcagaattcgtagccttcgggctcgccgctgtacacgcagtacgggcggccggaaatgtcgaccacggccttggccagcgcctcgtcgagcggcacggtggcgtcggcgaagcggcggatgcctttcttgtcgccgagagcctgcttcagagcttcgccgaacacgatggccgtatcttccacagtgtggtgcacgtcgatgtcggtgtcaccgtgggcgtggatggtcaggtcgatcagcgaatgcttgccgagcgcggtcatcatatggttgtagaacggcacggatgtatcgatatcggttttgccggtgccgtcgaggttcagttcgaggtcgatgtgtgattcgctggtttcgcggacgatgtgcgcggttcttgccatcatgtctcctgtgtgattcgtcatattggattgcggcgggactcgaatcgcttcgggtctcgccgcaatcggaaagaaacgtcccttatgctgcttccactatacgaagcacttcaacaagggcgttacggaaggtttccatctcctcgtcggtgcccatgcacacgcgcagccaaccgtccggtccgaccacacggatgagtacgccgcgcttcaggagctcgtcgaagatggcttcacgcttgtcgaagtgcccgccgaacagcaggaagttcgagccggattcggccacttcaagcggctggtccttgtaggtctgttccttgagccatgcggcggtggcctcgcgggtttcgcgcaggtgctcgacacggctcagctgctcgtcggtgtgttcgaaggcggccagtgcggcggcctgagtcacggcggacaggtggtacggcatacgtacgatacgcacgcagtcgatgatgcccttggacgcggccaggtagccgactcgcgcaccggcgaaggcgaaggccttgctcatggtgcggctgacggccaagttcgggtggtccttgatcaggctcacggcgctcggggtgccgggcttgcggaattccacgtacgcttcgtcgatgacgagaatcgggtgcacgccctcgcccgcgccgaccacttcagcggtttcgcaggcggcgagaatacgttcgatatcctccatcggcaacggggtgccggtcgggttgtttgggctagtgagcagcaccatcgagggcttgacctcggcgagggcctcaagcaccttgtcgacgttcagcgtgaagtcggcgttgcggtgggcgagcttccaaccggtgaaggtgtcgcgggcgtactccgggtacatggagtacgtcgggtcggcaccgagtgcggtgcggcccgggccaccgaaagcctggaacagctggagcatgatctcgttggagccgttggcaccccacagctcgtccacgtccagacgggtaccggattcgcgggccaggtaatcggagaatgcctgacgcaattcgatgtgctcacggtccgggtatcggttgagtgtgggggcgatttcacgcacacgcttggcgatggtgtcgcatacggccgggtccggcgcatacgggttctcgttgacgttcaggcacaccggcacgtccagctggggagcgccgtacggctcctcaccgatcaggtcgttgcgcagcggcaggtttgcaggaatcgagctcatcgcagaccggcttccttctcctgctcgcgcagggtggccttgtcatacggatccttgacgaagcgggagagcacgcactcgccgtgggcgggcaggtcctcggataccgcgaaggcgttgatgcgggcggcgagggccttgaggccttcctcgtcgtattcgatgacttcgaccggcttcatgaaggtgtgcacgccgaggcctgcggcgaagcgggcggtgccgccggtgggcagcacgtggttggagccggacatgtagtcgcccagcggcaccggggagtacggaccgcggaagatggcaccggcgttcttgatgcgcttgacgaccgcatcggcatccttggtctgaatctcaaggtgttcggcggcgtaggcgttggccgcgtcgatggactggtcgagaccgtcggtcagcacgatggcagactgggtgccggacagcgacgtgtggacacgctcggcgtgctcggtacgcggcacgcggtacttgaggctctcctgcaccttgtcggcaatctcggtggagtcggtgaacagcacggaaccggcgagctcatcgtgctcggcctggccgatgaggtcggcggccagcaggctcgggttggcggtttcgtcggcgatgatgccgatttcggtggggccggcaaccgcgtcgatgcccacgaatgcggagaccagcgacttggcggtggccacgaagatgttgcccgggccggtgatcttgtcaaccggatcgcacaggatgtcgccgtcctgcggctcgctgcccttggcgccgtatgcgaacatggcaatggcctgagcgccgccgaccgcgtatacctcgtcaacaccgaggatggcgcaggtggcgaggatggtcttgttcggcaggccttcctcattgtcgcgggcgggcggggtggcgatggccagcgattcgacgccggcggcctgggccggcacagcgttcatgatgacggagctcgggtagacggccttgccgccgggcacatacaggccgacgcgctgaatcggaatccagcgttcggccacgcgggcgccttcggcgaggtcggtgtagaagtccttcggcacctggttggcggccacggcgcgggcgcggcgcaccgattcctcgatggcggcgcgcacttcggggtcgagcgtggtcagggcgtccttgatcgcctcgaccggcacgcgcaggttcttgggacgcacgtgatcgaacttctcctcgaagtcgcgcagggcagcggcgccgcgttctttgacatcgtccagaatcggacgcaccaaatcggtggcttcggaagtacccattgcagcacgcggcatcgcggcaagcagttcggcacgggacaggttctgaccacgcaggtcaatgattcgcatgatgttctcactcataacgccccatcgtagcaatgtgcgaggcctaagcggcgaggaacgcccatgttcacccgtatcgtgagattatcgtgcgtgatgtgggttcgtgatacaggttattgacgcacgccaaatgcccgagcggtctcatcgataatcggcatgtcatgcacggcgacgtgactcacttcggaccatcgcgggccaatggctaattgctcaaccaaggcttgcactgcgtcgctgctgccttgtgcttccagctcaaccgagccatcgcgacaattacgcacccaaccccgtacaccaagccgacgtgcctgagtcaccgtaaaataacggaatcccacgccttgcaccagtccgttgaccactatatgtttgcggaccaaattcgccgattgcctcatgatgctcagttcctaatccatcgttcgcagcattgggtagaggctcaggaatcgccggtatgcgtcggcatatgtgcgtgcggtgtcaggattcggctggtatacagtgcattcgcatactgattgcagcaggtctggtacattgaataccaacgaggccattgccactgctggcagaatatcggcattggcgaacacttcgatgggatgctccaacacatcggccagaatctggcaccacgcattttctctggctccgccgccaatcagggaaatctcggtgggtttggcgtcaaaactttccataccttgacgaatggagaaggccacaccctcaagcgcggcacgcatcatgtctgccttggcggtgtctggatcgaggcccacataggcaccgcgaatattcggattcataacagggaatcgctcccccaccagatatggcaggcatagcacaccgttggagccgggtttggatgtttcgataagctgatgcgcctctgcgtaatcgccatcggagaatacgccggtaacccatttatgcacgtcgccggcgttgaggaatggcacggcattcacgaagccttcttccacgccaaatgccagattcgcagcacctggcttgtcggtgaacggctcgggcgaaacggtggcgatccagcctgaggtgccgatattgatgttgtattgaccagggtggctgacaccgctggcaagtgtggtggcacccgcgtctccaatgcccgcgtataccgcagttccggcggaaaaaccggtgcgttgtgcagcggattccgtcactgtgccaatgttgtcttgcggattgtgcaggtgtggcaatatggtcatgtcgatttctgcgacctcgcataattcggcatcccactggccattacggatattcatggccccagctgtggaacacgccgccacatcgcccacgcattcgccagttaattgggcgatcaagtagtccttggaactgatcaatacatgacgaatgcgcgcgtacgtttccggctcgtgttcacgcagccacatcaacttgggcaacggcaagcagccttcgagccggttaccaacggtgttcaggaaacgttctgcaccgccctgatatgtctcggcgagttgcttggcctgttcctcggctcggccatccgaatacagaatggcattgcggacgggattgagctcgccgttcaaaacaataacatcctgcatctgaccgctgaaaatgatgccacgaatgcgagtcacattgaattctgactcggattgccgcgcctgctcaatcatgtgcctggaggccgagcagaaagcttgccaccattgatcggggctctgctcccgatagtcgccgttgataataaggtcaagttcgctactcgcactagctacaatgcaaccctgcccattaactaaggcacccttcaacgccgtggtccccgcatcaaatgcagccacatattccgtagtcatatcgttcatcgtagcgctgaaaaaaagaatcattctttgccagcaaaacgcggcttattgcatcgtcttgtttctagaatgggaaattgaacgaatactacgactagtgaggcattatggcaattcaatcgacaatcatgctgaacaacggcactgtcatcccgcaggtgggcttgggcgtattccagacaccggatggtgatactacagtgaacgcggtgcagacggctctggagaatggctaccgccatatcgataccgcaatgatttaccacaacgaggcttcagtgggtgaaggtattcgccgtgctggtgtgccgcgcagcgatttcttcttgaccaccaagctgtggaatgacgatattcgcgcacgccgcggcaaggatgcattccaagaaagcctcgaccgcttgggcgtggattatgtggatctgtatctgattcactggccggcagacggctggcagcaggcatgggacgacttgcaggagatttatgcctccggccgcgccaaggccattggcgtcagcaacttccaaaagcatcatatcgatgagctactgacccatagcgatgtggtgcctgctgtagaccaggttgagtcttccccacaattcaccaatcaagagcttattggccagctgcgtgccaagggcattcacactgaagcttggagtccgctcggcggcaccggcggtaacctactcagcaacccagtactggccggaatcggtgccaagtacggcaggtctgctgcacaggtagtgattcgttggcacatccagcgcggcatcgtcgtgcttcccaagtccactcatgccgagcgcatcaagcagaacttcgaggtcctcgacttcaacctatcggtcgatgatatgaccgccatctccgccatcaacaccggcaagcgcaacggtgctgatccggacaatttcaatttctagacctttatcggtccagatacgcaaagagggaactctccgtcattggagggttccctcttctatatgctttcgattcggccacaccctaggtgcgagagcctatgtcttgtcggtgtcttgtcttgttggtttcggatatgggaaagccccttggggcgtgtgctccgaggggcttcctgtacgtgtggtgcggcggcgtgctactctcccacaccctgtcgggtgcagtaccatcgccgtgccaggccttagcttccgggttcggaatgggaccgggcgtctcacctgggccatggccgccgcaaatcttctcttgtacggtcagacgctggggtctgccggcctgtggcggcctgggaaccggacagcggacgcggatatgtcgatgtttcgtcttgtggccagacaatgctcattgccgtctggtgccgtttgcaggaggaagatgcggtccaaccgccaggggttggaatgttagtgttgcctttcgtccgttagtaccggtcggctccacccctcgcggggcttccacgtccggcctatcgaccacgtgttctgcatggggactacaggaactcgaaggttccacggaatgcttatcttggagcaggcttcccgcttagatgctttcagcggttatcccttccgaacgtagccaaccggccgtgccactggcgtgacaaccggcataccagaggttcgtccacccaggtcctctcgtactatgggcaggcctcctcagcattccaacgagcgcagaggatagagaccaaactgtctcacgacgttctgaacccagctcgcgtgccgctttaatcggcgaacagccgaacccttgggacctgctccagccccaggatgcgacgagccgacatcgaggtgccaaaccatcccgtcgatatggactcttgggaatgatcagcctgttatccccggggtaccttttatccgttgagcgatgccgcgtccgtacaccggcaccggatcactagtcccgactttcgtccctgctcggaccgtcgtcctcgcagtcaagcccgcttgtgcacttgcactcgccacccgattgccaaccgggctgagcggacctttgggcgcctccgttactctttgggaggcaaccgccccagttaaactacccgccaggcactgtccctgaacaggatgactgttcgaggttagacatccaatgcgaacagagcggtatttcaccttacggctccgcgcgatctggcgaccgcgcctctcggcctcccgcctatgctacacaatccacaccgaatgccaataccaaggtatagtaaaggtcccggggtcttttcgtccttctgcgcttaacgagcatctttactcgtactgcaatttcgccgagctcctggtcgagacagtggggaagtcgttacgccattcgtgcaggtcggaacttacccgacaaggaatttcgctaccttaggatggttatagttaccaccgccgtttaccggggcttgaattcaccgcttcacccgaaggctgacggatcctcttaaccttccggcaccgggcaggcgtcagtgcatatacagcggcttgcgccttcgcatgcacctgtgtttttggtaaacagtcgctaccccctggtctgtgccacccccaaaagctcccacagcaagtgtgttcaccatcgggggtctcccttaaaccgaaggaacgggagtgatttgccgagttccttgaccaggattcgctcgatcgctttggtattctctacctgaccaccagtgtcggtttggggtacgggcggcttcgagcctgacgccgaagcttttctcggcagccgggatcaccggatatcgggccataaggcccccatcatcgcacctcggacccatgcgggacggatttgcctgtcccacgccctgcgtgcttgaccacggaagaccacctccgcggccggctacccttctgcgtcactcctgcgctgacctactacaaggatcggtcccaacaggccagggcatcccgcccccgaaggagcagtaagcccggacccggaggttagtactccaagcctcggttttggcggctgaaagccggtacgggaatatcgacccgttcatccattcgactacgcctgtcggcctcgccttaggacccgactcacccagggacgatgaacgtggccctggaacccttggtcatccagcggacgggatcttcacccgtctctcgctactcatgtctgcattctcactcccatgaagtccacggcgcgttcacacggccgcttcgcccctcatgggacgctctcctacccagtacaaaatactgccgcgtcttcggtggtgtgcttgagccccgctacattgtcggcgcggaaccactagaccagtgagctgttacgcactctttcaagggtggctgcttctgagccaacctcctggctgtctatgcgactccacatcctttcccacttagcacacgcttcgggaccttagacgacggtctgggctgtttccctttcgacgacgaagcttatcccccgccgactcactgccgggatacgcgtcaccggtattcggagtttggttgctgttggtacccgatacgggcccgcaagcatccagtagctctacccccgggacgtaatgacccgacgctgcacccaaatgcatttcggagagaaccagctatcacggaatttgattggcctttcacccctagccccaagtcatccccccggttttcaacccaggtgggttcggtcctccacgcggtcttacccgcgcttcaacctgctcagggctagatcatcccgcttcgggtccaggacacgcgactcaaacgccttttaagactcgccttcgctacgcataccccacacgggttatgctcgccacatgccactgactcgcagactcatttttcgataggcacgccgtcaccccacaaaagggctccgacggattgtaggcgcacggtttcagagactgtttcactcccctcccggggtacttttcacctttccctcacggtactcgttcgctatcggtcagacaggaatattcaggcttacccaacggtctgggcggattcgcacggggttccacgggacccgtgctacttgggagacgcgatcggcagaccatgcgcgttcaggtacggggccctcaccctctgcggcccggtattcaacccggttcccctgacacatggttttctgcaactgccggccggcccgtcggagccggcgcacgcgatcccgcaacaccccgcgcgcaacccccgacgggtatcacacgcgcaaggtttggccatcatccgctttcgctcgccactactcacggaatatcctttcctgcaggtactgagatgtttcacttccctgcgtaccccccggccgaagccggtaccgacccatgacggtcggtgggttcccccattcggaaatcctcggatcaaagccctgttggcggctccccgaggcatatcgcagcctcaaacgtccttcatcggtcctgtctgccaaggcatccaccatacgcccttgcaagcaacacacaccacgaaagtgcatggccgcaagattcctctagcaaattcccagacgacaaatcatcacactaaaaatgatcacaaaacgatcgaaacgaacaatagagttcgattcgaaatcaacagcaaaacaaagattcaaaaacccttgttttgctcgcgtccactatccagttctcaagccaccacgcaccgccacgccatcgcgccggcacacggccggcccccaggcacgacgggcatcgaatcgcgccaggcaaaaagcctggggtggcgatccgggagcccaaaagcgcatccataccaccccggcacccaccgcacgaccggcagggcaaagccaacgacgtcttccacaccagcaaccccgccgccatcgcaccatgcgacgcgcggggcgcacaccgtcggacgaacatccgactgaattctccgtagaaaggaggtgatccagccgcaccttccggtacggctaccttgttacgacttagtcccaatcacgagcctcaccttagacggctccatcccacaaggggttaggccaccggcttcgggtgctgcccactttcatgacttgacgggcggtgtgtacaaggcccgggaacgcattcaccgcgacgttgctgattcgcgattactagcgactccgccttcacgcagtcgagttgcagactgcgatccgaactgagaccggttttcagggatccgctccgcgtcgccgcgtcgcatcccgttgtaccggccattgtagcatgcgtgaagccctggacgtaaggggcatgatgatctgacgtcatccccaccttcctccgagttaaccccggcggtcccccgtgagttcccggcataatccgctggcaacacggggcgagggttgcgctcgttgcgggacttaacccaacatctcacgacacgagctgacgacgaccatgcaccacctgtgaacccgccccgaagggaagccgtatctctacgaccgtcgggaacatgtcaagcccaggtaaggttcttcgcgttgcatcgaattaatccgcatgctccgccgcttgtgcgggcccccgtcaatttctttgagttttagccttgcggccgtactccccaggcgggatgcttaacgcgttagctccgacacggaacccgtggaacgggccccacatccagcatccaccgtttacggcgtggactaccagggtatctaatcctgttcgctccccacgctttcgctcctcagcgtcagtaacggcccagagacctgccttcgccattggtgttcttcccgatatctacacattccaccgttacaccgggaattccagtctcccctaccgcactcaagcccgcccgtacccggcgcggatccaccgttaagcgatggactttcacaccggacgcgacgaaccgcctacgagccctttacgcccaataattccggataacgcttgcaccctacgtattaccgcggctgctggcacgtagttagccggtgcttattcaacgggtaaactcactctcgcttgctccccgataaaagaggtttacaacccgaaggcctccatccctcacgcggcgtcgctgcatcaggcttgcgcccattgtgcaatattccccactgctgcctcccgtaggagtctgggccgtatctcagtcccaatgtggccggtcgccctctcaggccggctacccgtcgaagccacggtgggccgttaccccgccgtcaagctgataggacgcgaccccatcccataccgcgaaagctttcccagaagaccatgcgatcaactggagcatccggcattaccacccgtttccaggagctattccggtgtatggggcaggtcggtcacgcattactcacccgttcgccactctcaccaccaagcaaagcccggtggatcccgttcgacttgcatgtgttaagcacgccgccagcgttcatcctgagccagaatcgaaccctccacaaaaaacttcatgaaaagcatccgaatagatgactctcaaaacaaaaattgacgagcacgtccttaaggaaggacgccctcaaaaaacctcacccctcatcaaaccctcccgggtacccgaccaccacgacaggcaatcaggcgaggaatgaactggcaatcattgactataaagaagtagtacaaacacgctcttgagttctcaaaccaccaccactcacccacctcgcagctccccggaggagaaccactcgccgagcggcagcaaggaaataacttacacgcattcacggactcgcgcaaaccgggcacgaaaaaacacgccagaatcgttgaaacgacaggcttcgcccggcgtgtcgaaatcagcttgaatcacgccgttaccatcaggatacgccggctctttatgggctcacgtaacgaaatcagatgttcaccggcgtgtcgcaacaatttattccacgttcaactcccctcagtccgatcacgcggacggctcacccgcaattacggacgagcaaagctcgcacccttatggctcgactatcgtctcgccttcgtctaaaaaacagtccaccggactgttttttagacgcctcagcatcaaagaggggaaccaaagggggattagaaggtcaggcgcatctgatgccagaccacgtcaccgtgagtggactccgaaatgccctcgtcctcatacccaaattgcgcatagaatccgaccagccgatctttgcaggtgagcaccaggcctttacgtccagctgcacgagtgtcttcaatgactttcctcatgagtgtactggcgcaaccgcgatgctgatacttcggcgcagtatccacgccgaaaatcatttgccagtcaccttgagggttgtgctgcgcggcatcctcgtacatgtcatcggtcaagtcgcgccgatcggtcgcgaaaccgttgatgaacgccatgacgatctcgccatcaatcaatagccagaaacattccggataggtctcgattcgggcgcgcagggacgagcggtcggcggcctcggcggccgggaagcattcggattccatggcggccagcgcgtccagatcgtcgatggtggcgtggcggattaactggggatcagaatcagtcatgtttttgtctttctcttaacactccgttgtgagcaacttccctcagtcacgcttcgcgtgccagtcgaggggagccagatggatgtcagattacgtggtattcgcgtaacagggtggcaatatcggtgccgtcgagtttcttgagcaccttcttgaccacggccttttcaatgaagttgagcttcatatcggtgaccggtgcaccgtcacgcaatttgacggtggcgttgagcaggttgcgcacgtcatagacgctaccccacacttcaggcacgccgcggtccacgccgagcaacgtgtagacagcttccataccggtgcgcatcgagtattcggtggtgaaaatcgtgtcgcgcggggtctcggcgaactggccaaggaatgcgaagttcacggcaccatcgggcaccacgtccgggcggtcgccggccgcgcgcggcatgaagaacgcggtgatgtacggcatcatgaccggcacggtgttggcgtggtgctttgcgagcgcctcgatcttgtcggtcggcacgcccatgtggtaaagccactcctcgcaaatctcttcaccggtgcattcggtcatcggcttcttcacatagttgccgggcttgtccgggaacaggccgtagacccatacgcacagctggtccttgggctggtcgcggaactgctgctggcggttcagggtccaactcatgagccagttggagtcctgcacggtgacgatgccgccggtgacgaccttgccggagaacgggtcgcgcttgcagatcttctggatgtacggcggaatctcgccgtccagggtggtgacggtggcgctcatccacttggtggcattcggatcggagcagaacttctccggatggccaaagctcgggtcctggtcggcgatacgcttccacatatcccagccgccaccgggcttcaggtctgggttccatgcggcgggcgagttctgggaacccatggtggagttctccacgcaaccgccgttggtgatgaacaccagatcgttctcggtcaggtcgatggaggatttatcaccctcgtggtccacgtcgatgcgcacggcaagcttcttggtgggcgtgctggcagggttgcgcttgaagaagccggaggtggcctgaatcttctggatggtgtcttggcctacgccggtgtgctcgcgcttggggccggctcccccgccaatcgcgaattccacgttctcgaccttggtgttgtagcggaattcgacgccgtgcgattccagatacttgaccatcggcagaatcatcgactcgtactggttgtagcgggtgaaacgcagcgcggaaaagtccggcaggcctccgatgtgatgaatgtagcgcttgatgtacagcttcatttccagcgcggagtgccagttttcgaaggcgaacatggtgcgccagtacagccagaagttggagttcagcacctcatcatcgaagaaatcggtgatcggcttgtcatacaggtcttcgtccggggtgaagaacagcttcatgatttccatcgaagccttgtcggacagcccgaacttgcccttgagccccgcgtccttgccgagattcttggtggcgcggcacagcgagtagttcgggtcctccttgttgagccagtagtactcgtcgagtacgctgacgccttcggtttcgatggagggaatcgagcggaacagatcccacatgacctcgaaatgattgtccatttcgcggccgccacgcatcacatagccaaggccgggaatatcaagaccgtcacaggcgccgccgggtaccgggtccttctcaaggatgtggatgttctcgccaggcatctgaccatcacgcaccagataacaggctgcagacaatgccgccagtccggtaccgatgatgtatgcatgcttgttgtccacgtcggccggcttcttcggacgtgcgaaagcctcataattgccgctgctgtagtacatattccgcctccttggggcagagttgacacttcatcaactcttcttgaatagacatcatgtcgcattattgacgaacgcgccataggcaacgttcggcgttctgccgcattcgccaataccttgcatctacggttttcgaggcctatgttggctgttggctcataactattgaaggcatacaggcatactgaggatgcggggtgcttcaccgaaccggatgattgataaggtcccgttcaatccacgccatgaccaaatcggcaagtcggtttacctccgcttcggcgagttcacggcctttgggcagatgatgccatttttcgatgcatccgcggcagcatgtggcggtagcatgctgagcggtgaataccggatggccgcgccatggcgtctgtctgccgtcgttcttcggttcggctgcgcctatgcggtctcgcaacatttctcgcgcatgacgatcgatggtcgccttgcctttggtgcgggcataggctcggtctttgtcggtcaaagcgaatttggcgcggaactgcgaatgagacagccgttccagcatcgtggcaatccattgttgctcgtcatcgttgttaccagtatccgccatctccatgcccatacgttccacagtagtcgcgcacatcgtatggtggcacacgccttagctccctctgatgaaggagcccccagcaaagccaggtgtgaaccgcaccccgattgttggactggagtaattcatgtccgatgatttggaggtgcggttttctatgtcacggaaacgcaggggttcatacgatgtcgagtatatgagaatcgtcgtcgggttgattcgcgatgggatcggcgccaagtcgctcgcccgccggcttggcgtgtccaaggaaaccacgagagaatggttgctgtcataccgaatcggcggagaggcggcgctcatgggcgaacgcgagggcaacaggaaatacgattacgagacgaagctcgccgctgtgctcgaccatctggaacgtgggatgagcaggccggaggtcatggaacgttatggcatcgccagccggacgtgtctgaaacagtggtgccaggactatcgtcgcggagggccggaggcgctgcgcccgaagcccaagggcaggccgaagggcgcgaaatccaaaccgaaaccggctcccacgcgcgaacagctcctcgaggaggagaacgcgtatctcaaggcgagggtcgcgtatctggaaaaagcccgcgccctgctggcgtcgaagccgacaaccgggagaagtcggtgatcgtctcgacgctggcggggctcggccatccgctccggtgcctgttgaaaatcgcgggattggcgagaagcacctactactatctcctttcgcatcccgagccggtcacccggccggatatcgagccgatggtcgctgaggtcttccatcgcacgcccaacgggtgcggccaccggcaggtgcgcatgtgcctcgtatacgagttcggcgtgcgcgtgagccataagagcgtgctcagggttatgcgccgcatgggattgaagtgcgccatacgccgcccgaacccataccgcagatacagctcataccaaggcgatacgggcgcgaagccgccgaacctgctggaacgagacttcgcggccgaccggccgtgggtgaagctgggcacggacgtcaccgagttcagggcagcgggcggcaaggcgtacctcgcgcccatatacgacatgggatccaaggagatcgtggcctgggacgtcagccggcaccccgacctcgcccagcagcaacggctgctcgccatgctcgaggagaagctgcccgaaggcgccgatcccatactccacagcgacatgggctggcaataccagcacgactggtggcggaacaggctcggggaactgggcatccgccagtccatgagccgcaagggcaactgcatcgacaacgccgccaccgagcaggtgttcggccacctcaaggacgagttctacaccggccgcgagttcgcctcgtacgaggagttcaagagcgaactggacgcgtacatcatccactggaacaccagacgacgccagatacgactggagggacacaccccggaggaattccggaacatgtccctcacagcctaatcaggtacccttaataaaccacgtccaacttccggggcgcagttcagtgagggagaggccaggggcgaaacccgccaatcaggcggcaggcaagcagctggggccaaacagaatcttgatctcagcaaacaacgaagtatctcgcttgacgcggaaacgatcgccaaacgtgagcacctgagcgttacccttctcatccagcaccgcaagatgtacttcgcagtaaccaggatgattagcgagcacctgaccgagttgcatcatgcgttggcgctccaacgccaccgacggcagcgtgatgaccaacggacgttcatcctcggcttccaaggtcggaatctgcatttccgtggctctcagagaaacggtttcgtcgcgcaactccacttggccgcgaatctgtacgatggcgtccacggcaagttcggcggcggccgcttcatagaccttgccgaagaacatgcattggatggagctttccatgtcttcgatggtcacgatggcccaggggttgcccttcttggatacgcgccggtccacattggtgaccaaaccagccaacgtgacctgctgtccttcacccatcgttttggctcgatcaaccagatgcgcgatggacatttcacgcaaggacgcgagaatcgactgcataccggagagcggatggtcagacacatacaggcccaacatttcgcgttcgaagttaagtttggtcttcttgtcccattcctcaagatcgggtacggtcacggaagcgtcgcccatggcctccgctcccccatcctcggcatcggagaacaaatcgaactggccctccgcctgtttgcgcttcagactcaccaccgaatcgatggcggcctcgtgcacggtgagcagcgcgcgacggttcgggtcaatcgagtcgaaggcaccggccttgatcaacgattcgaccaatcgccggttcagcgcggtcaggggcacgcggcggatgaagtccatgaagttcacgaacttgccgcgcgggccttcgcgttcggcgatgatatcggccacggccttgtcacccacgttacggatggcaccaagaccgaatcggacgacgtcgccgactgccgagtactcgtacaccgattcgttgacgtccggcgagagcacctggatgcccatgcggcgggcctcgcccaagtacagtgcggtcttgtctttgttggtggcggcaccttgcaacagggcggccatgaattcgaccgggtagtgcgttttcagatatgcggtccagtaggagatcagaccgtatgcggcggagtgcgccttgttgaaggcgtagccggagaacggcaccagaatatcccacacggcctgggaggcctcttcggaatatccatgctccttcataccggcgaagaacggcaccttctccttggccagcacttcgggcttcttcttacccatggctcgacgcagcacgtctgccttgcccagcgaatagccggcgaggattcgggcggcggactgcacctgctcctggtagatgatcagaccataggtctcgtcaagcacctgcttcagaggctcctcaagctcagggtgaattggcgtgatcttctgcaggccgtttttgcgcttggcatagttggtgtgcgaatccatactcatcgggcccggtcggtacagggcgataagtgcggaaatatcgttgaagttatcgggcttcagggttttcagcagcgaacgcatgccgtcggaatcgagctggaacacgccgagcgtgtctcctcgggacatgagtttgtaggtttcggcgtcatcgagcggaatcttggtgtagtcgatggcgggtttgccgttggcctcgatgttcttcagggtgtcgtggatgatcgtcaagttggacaggccaaggaagtccatcttgaccagccccaacgtttcgcacgtgtggtattcgaaggtggtggtgatggtgccatcggtgcgttccagcaacggcgaggtgtcggtgatgggtgcgctacccatgatggtggcgcaggcatgtacaccggtctgtcgaatcaggccttcgatacccttggcttcttcggtgatgcgcttggtgtccgggtcggaatcgtagagttctcggaattccctggcctcggcgtagcgtttggcggtcgggtcgaagatgtcatgcaggctgatgtctttgccgccggtggccgccggaggcagcgccttggtgattttttcaccgactgagaattcataacccatgatgcgggcggagtctttcagggcctgcttggttttgatggtgccatagatcacgcactgggcgaccttatcggtgccgtatttttcgccgcagtattcgatgactcgcgcacgaccttcagggtcgaagtcgacatcgatatcaggaaggctcactcgctcagggttcaggaacctctcgaaaatcaggccatgcttgagcggatcgagctcggtaatgcccatggaataggcgaccatggcgcctgcggccgaaccacggcccggccccaccataatgccgtgatccttggcccactgaatgtagtcggcgaccacgaggaagtatccgcagaactgcatctggcagatcacgccgcattcgtagtcggcctgcttcaatacgtcgagcggcgggttgccgtcgtaacgcttctccagaccttcctcgacttttttgaggaacagggaggtctcatcccagccttcggggcaagggaatttcggcatgaacgcgccgtcttcgtggtcgtcgaacatcacgttgcagcgttcggcgataacaagcgtattgtcgcaggcgtccgggtggtccttgaacagttcgcgcatctcttcggcggttttgatgtagtagccggtgccatcgaacttgaatcggtccggatcgtcaagacgggaaccggagttgatgcagagcatggcgtcctgcgcctgtgcatcttcggcgtgtacgtagtgggaatcgttggtggccagcagtggtgcgttgagtttcttggcgatggtcagcaggtcaccggtcacctgagtttcgatgggcagaccgtgatccataagttcgatgaagaagttgtctttgccgaagatgtcctggaattcgccggcggcgcgcagggcctcatcgaattgaccgaggcgcagacgggtctggatgatgcccgaggggcagccggaggatgcgatcacgcctttggaataggtggcgagcacctccttatccatacgcggataacgcatgacgcgaccttcgaggttggccacggacgaggctttgatgaggttgaccaggccttcgtcgttttcggcccacatggtcaagtgggtgataagaccaccaccgggaacgtcgtcgcggcgctgggcttcggtaccccaatgcacgcgggacttgtcttgacgtgcggtttccggggtcacataagcttcgatgccgatgatgggcttgacgccattggccacgcagttggtgtacatctcgtaggcgccatgcatgttgccatggtcggtgatgccgaccgcaggcatgccaagttcggcggcgcgtttggccaaatccggaatcttcgacgcaccatcgagcagcgaatagtgcgtgtggttatgcagttgcacaaagttgttcccgtaatcagccatgcgctctaccataccgtgtggtctgggcggctgttcagcattcccgtcggcactccgcgatgagggcggcgcacagcatgatgacctgggcgacgagattgaaccacaccagcgcgccgatcaacgccgcgaacggtgcgagcagcggattgcgggaggcgccggtcagcagtcgcgcgccgagcagctgcatcaccgaaaccgtcagggaacccgacgacgcgccgatcagcgtgaatcgtccggctttgatgtgcgcgaccacacgcaacagcagcatgaacaaggcgaagttcagcgcgacgccggtgcagaaaccggtcagctccagcagcagaatccccggcagcgagctgctggcgatgccgctccactgcaacacgcgccgcaccatgccaccggacaccgtaccggccgcggtcgaaagaatgaacagtattgcgatggcgatggcggcaagcgtatcgcgtaaccttgcgacgacgatattgagctcgtcgccgcagtcgtcgaacatggaccgtacggcgtggcgcagcgagttcatccagccggtcaccgtccaccagaacatggccaacgtggccagaccggtccacgtcaatgtgcttgacatggtgtttagtgcggaagacgtcagaaacgagtcggccacaccgggaatgacttcacgcaccgcgtcaatcagcatctgctgccaatcaatgttgccgaccatgataaggccgaacacgctcaccgcaatccagacgccggcaaaaaaggcgaacagcagaccatatgccagaccattcgccagcagggggccgcgccgcgacacataccggtcgagcacgcgcccaggcagcgaacgcgcccacgcgtccgctcccctgtcaatcgcactcttcaacccatgcatagttcaactgtagctgttgttaccgttgtcccgaattcaatttgtaagtgcaacgctcgtcgggggggggggtgacgttttgttggacttcgttgtctgtatggtcgttcgcaacgatagcacgcgcgttcaggcgacgagcccgagttcgatgcgtttgtccatgatgctcatgccgtattcgagtttgatgcgcttgtccctgtaccagaccatgcactcgtccaacaacgtgacgaactcgtcgatcgagacaccttggaagcttcgcttgtggaagaactcctgcttgcctgccgaagcccccggcggctgcgttgtccggactgcggcccttcgcgcccatcgaccgcgtcaggccgtggctcccgcagacgcggatccattatgcacatctcggtaggaacaaaacaacgtcaatgaagaaacctgaagaatcgctggttgtcctgtcatctttagatgacaggacaaccagcgacaagagtaatcgcctcccgttgtctaaatgaaagtgcaacacccgttagattggagattgtccagataaccagtccgaagggatgtcgcacctatgggagaagtgtattcgcacctgtcggaagaggaacgccaggtcatccagatcgagataggcaacggcgccagcatacgcgggatcggcgcgatgctgggccgcagcccgtccagcatcagccgggagatcaagcgcaacacatggttcccgtccaacgagaacgagtcgtaccgcccgtaccggccgaaaagactgaaggcggggccatggaccggccgctactacatcgccgggcccgcgcagcgcaaggccgaccgcaggagatccaagccacgaaagccctaccggctgtcgcacgaccgcctgtgggcgcaggtggccgaatggctgggccgcggctggtcgccgctgcccgtcagcggcaggccgcgcgtcctgtggccggacgatgcgctcatgcgcgtgtgcccggagaccatctaccgatgggtctactccagcaggccgcttcgggaacgctgggcgcggtgcctgccgcgagggcacaggcggcgccgcaggcacggcggcaggaggacgtcgcgcttcccgatccccggccgagtgcccatctccgaacgcccgccggaggccgacggcaggagcgcgttcggccattgggaggccgacagcgtcatcggagtgggatgcaacctgcacaccgaggtggagaggaggaccaggttcctcatggcccgcgtcgttccggacaagaccgccggcgagagcgtcggggcgcagctggacatgttctcgccgctgccggccggcgcgcgcgtcagcgtcacgcacgacaacggcaccgagttcgcccaccacgaaaggctgcgcgacgggctgggcatggccacgtacttcgccgacctgtactccagccggcggcggggaagcaacgagaaccgcaacggcatgatccgccggtatctgcccaaacgctgcgagatacggatggacatggcaaaggaggtcagggagatcgtcgacgagatcaacaaccgccccatgcgcgtgctcggctaccgcacgcccgccgaggcgttcgccgacgaactgttagaattgcaggaccaacaagggtgttgcacttctaaatagacatcggggtaggctccgcccgcaagtcacagtggtacaattttcaggtttgagactgtagcaagttgagtcgctttatcagtaagtctgtatttggaggtatcgatggcccatcgtccgcttatcggcgtggtcccgttgtgggacgacacactgaatagcctgtggatgctgcccggctatttcgacggcatcatcgaagccggcggcatcccggtgatgctgccgctgaccgacgacgagactacaatcgaacagctggtcagccaatgcgatgggttcctggtcaccggcggccacgacgtggatccagaacggtatggcgaggcggccggccccaagacggtcaaactatgcaaggcccgcgaccggatggaggagcgcctgatcccctccgtcatcgcggcggacaagccattgctgggcatctgccgcggcatccagagcctcaacgtcgccttgggtggcacgttgtggcaggatctgccggacgaacatcccagcccggtcgtgcatcatggcgacaagccgccgtatgacccggtggtccacgaagtgtcgatcgcgcccgattcgccgttggcccgcgcgttgtggccgctgggagacaacggcccgagtgaggcggaggccgatgaggtcgattccttcggcaggccgtatcatccgcgcgcctatacgctgggcgtcaacagttatcaccatcaggcgattcgcacgctgggccagggactggaaccgatggccactgcgccggacagcatcgtggaggcggtctggatgccggccaagcgtttcgtctgggccgtccaatggcatcctgagttctctcaccgcgccgatagcaaccaacgtcgcatcctcagcgccttcatcgacgcctgctgacgcaagctcccgccaatctcgacgaaacgtcttccaagaaatggcttgcccgcatccgcagccccctaccacgacatgagcgcccttgacaacgtcaccctcggcatgcgcttcacccgtgacagcaaacaggtcaggcagcgcaaggccaaggccatgctctcccggctcggactcggccatgtcgcgggagacaagatcatgaccctctccggcggtgaacagcagcgcgtcgccctcgcacgatgcatattgaagcccggggatttgatcctcgcggtcgagcccaccggcgcgctcgaccgcgatctcgcccaacatgtcttcgacgaaatgctccgcctccagcacgaatacggcaagaccctcatcatcgtcacccacgatcttggcatcgccgcacaatgcgacaacaccatcgagctacaggcggtttgacggagatattccggcagctttggtctaccgaagtcacgtgttgcccttcaatctcctcggaaatctaggtggcccatttttcaaagaatgcgatcggacgtaacgccccgtaaggagacctgcaatatgaaacgttgaatcgtcatctaaagatgacgttttcgtagatcttccggaatcgccagtcatctgcgatccggatatggcaccggtccggctcgatcgagcccggacgaccatggagaaaacgaacgatcgaatccgaacgcgggtaaagagcctgcgcgacaccattgataaagccaaatttaagaaaacagatcagtatgcataagttttacatgccttcagcctcgtcaaccggcagcgggcccagaatccagtcacagctaggcagagcgtacaacatactgcgtagtacatggcgcgaatcccaatgaccactatcgattgatgacggccacgaatactcgtactcagccttactgctttggctcatttctgttcacttcacgctggagtaccgagacacgttgagcggaaataccggtaattcacgtacggttaccgaccattggactgaatggtactcagcatccgcagtcacttggggtatggtcatgacggagagccatcatgaccgatctctcgttattctgggatgaatccggcgaagccggaactgaatctaaatattaaaacgcatgatgcacacgtcgcggaattagtccaccagaacttcggcatgctcggcaggttcagcgggttcgatgtgtcgggcacgcatggcatcgagtgcggcagccaagtcggccgggtactgggaccggaccgtggtccagacgcgggtgcggggatgacggaattcgagcttcatggcgtgcagccactgccggtcaagtcccaaggcctcagacagcaccggattggcaccatacatggggtcgccgcacaggggatgcccaatcgaggagaaatgcacgcgaatctgatgagtacgtccggtctccagattcacggataccagagtggcctcatggccgaaacgctccagcacatcccagtgcgtaacggccggtttgccggccggagtcacgcagaagcggaaatcggacactttggcgcgcccgatcggcgcctcaatggttgctttgttctctttaagaccaccctgcacgagcgcatgataggttttctttacctcatgctcggcgaactgccgacgcatctcggtgtacgcaaggtcggacttgcacaccaacatcaagccggaagtgcctacatcaaggcgagaaacaatgccctcacgcccggccgcaccataggaagtgatatgcacgccgcggtcacgcagtgatccgagcacggttggaccggtccagccaaccgaggcatgcgccgccacgcctacaggcttatcgactacaacgacatcatcgtcttcgtagacaacggccatatcagttgcgataggctcaggctcggcctgttcctccgccaaatcaaattcgacggtctcccccgcctgcaatgtgctggaccgcgcaacttcacgtcctaaaacgcgcgcctgcccggagtcaaccagatcggcggctttagatcgtgaaatacccagcattttggccacggctacgtcgaaacgcttacccaccaatgcatcgggagcagggactattcgactcattacttggcgtccgcctccggctcagactgtagggattcgtcggattgctcgatgagatccttgtgtgagaacggctcccccataagaatcagaatcaccaggaccacaccggcgactaccagatagatatccgccacattgccaacggaccagccatagttaaggaaatccaccactttgccgtcgaggaagccgtcagcgtacataacacggtcaatcaggttgcccagagcgcctgcaaacgcgaaagaaatcgccaccgaccatttcatggagacagtgcgcaccccagccacagcaagggccacgcaagccacaacggccaacagactgattacccaagtagcgcctgatcccatgcccaaggacgcgcccggattacgcaccaaggtgaaggacagcagtccgggaatcacgcgaatggtctgaccgttggataacgcggccatcgcccaagccttggtgagctgatcgacaatcagcgcagccgcggccacacatgcaaagacggccacgcgggtgcgcagccgtccctgttggttcgtcatacgacctgtacctgcctacgctcagttggtcttggacgaggtctggtcgacgtagttgttcgactcggaaacctgcgatgccagctggccgaggtactcggtgaggcgggcgcggtattcagtctcgaactgcttgaggctctggatgttgccctcgacgaccttggactgagcctgaaggttgtcgcgcacctgctcggcatacgtatcggctgcagagcgggtgttcttgtcgtacgcatcagccgcggaacgagtgttcttgtcatactcggcggcacgctgctgcacttccttctcgtagttgtcagcgtcatcgtgctgagacttggagtagttgtccgcatcctgacgagtcttgacggagtatgcgtcggcctcagaacgggtgttctgggagtaggtctcggcatccgcgtgagtctggtcacggtaagcgtcggcctcggagcgggtacgatccgaataggtgtcggcgtcggaacgagtacgagtggagtagtcgtcggcctcggaacgggtacgctcggagtagttgttggccttggtgaccagatcgttgtacttgttctggctggcctcggtgatttccttggccttgttcttgcccttctccacgtactgatcgtgcagctgcatagccagggtcagcatggcggtggcgcgctcgggctcggtgcccggcatggaagcggcgccagcgatcttctgcagagaaccggtctcggtgctcggctcgaccttagaaacctgagcacgaagctggttttcacgctgcttggcttcttcgagctgacgggacagctcagcgatctgagcggactgctgctgagcggcggaaccctgctgctgagcagcggcgagctgacgggacagctcctcgttggccgcgcggaactgatcacgttcctgctgaatggcggcgatctgctgaccgacagcctcctggtcaccggaggcctgagcagcctgagcggtgagctgatcgatttgagcgttcagctgatcgacctgacccttgagctgctcattctgggaggacagcgcgcggttggattcctcggcttcgctgagcttggcagagacaagctgtgctgcctgatcattgccagcctgagcggcctgctgggcctgagccacagcgttcttcaaaccagcattctccgactcgagttgctgcacctgaccggtaagatcggagatcttcgcattaaggttggtcacgtcaggacccagagtctgggtggcctgaccgccggctaccgcctgacgtccaagagcctcgacggtttccgtgacctgatcaaggaagtcatcgacctcgtcgacatcataaccttccttgaatcgaacagtctggaaggtgtgctccctaatatccttcggcgtcaacagagccataaatcttgcacctcgctttggggcatcgcccgcacttacgttggtctcaagtcagaatgctatcacgaccccatcgtttcagaacattcgacgtgggtttttatgccagatatatgcctccggcgggtcaaaaacggcctcagaacactatcagaacaacactttccagtaccaccagcgcaaaatacagcacaatgaagctgacatcaagataaatcgaaccgagcggcaatgggcgaatatagcgacgtagccagcgcagagggggttcggtaatggaatacacaatattgatcagctgggccaccacaccacgtggataccagtttcgtgcgagaacggagacccagtccagaatcatgcgcacgaacagaaccgtgatatacgcgttaatgagccatgcaagaatgcggccgatcagagagaacactaaggaaagcatgctgacagactaacaaccgcgcatgaaaagtttgctcggagcacaataagaatcggccgactccttgctgggagtcggccgaataccgatataacgtcgaatgcgaaaactactgaaccggtcagtcagcgaacaaatcgtgtgccgaggctggttttgtcggctcttcgaccttgatgttcacctgcgccgggctcaacaggaacacgcgcggagtgacacgctcgagggaaccacgcacgccgaacaccacgccggcggagaagtccacgatgcgatatgccacggcttcggccacaccggtgagattcagtacgaccggaacaccgtcacgcaatgcgcggccgaccagttgagcatcctcatatgacttcggatggatggtggtgattctgttcacacggccaccggggaacggcttggtagtcgacgatgcggcaggcgcggtggttgacgccagcggcgtgaccgtatggtcggaatcaaatgcggacttcgaagccggcttctgctcctcgtcctcctcgatgtagtcgtcctcatcgtccacaacgtcactcatgcccagataggacatcgcgtttttcatgaacccagccatggatcaatcctttcagcgcaggaagtcagggatgtcgagatcgccagccggatcgttcacggcgatattcggatgagcggaagtcggatcatcaaaaggcaacgatgcggagtcaccggtagccggtgtgaatgccggttgggcagtggcagcgggctgtgcagccggtgccggtgctggagctggctgtgccacgggagtcgcaggatcggcggcggttggcacaaccggcgtcaccgtgctctgagtgtcgtcatcttgagcggcgacggggtcaaaaccagcagcaataacagtgacacgcacttcatcgccataagcatcgtccagagcaagaccccaaataatctgggcttcagggtgaatggccttgcgcaccagttcggtggcagcagaagcctcctgcagcttcaggtcggtcggaccggcgatgttgatcagcgcaccgtgtgcgccttcgatgctttcctcaagcagcggagagctgatggcgatttcggcggcctgcgtggcacgatcctctccccgtgcggaaccgataccaaacagcgcagtaccagcaccacgaagaatggagttcacatcgttgaagtcgacgtgaatataggagttcatcgaaatcaggtcagtgatgccctgaacaccggcaagcagtgcggtatcagcggtcttgaatgcctcaatgatgccgatggaacggtcggaaagctcgagcaggcgatcgttcggaatgacgatcagcgcgtcgacttccttgcgcaggttgtcgatgccgtattcggcggaagcggaacgctgagggccttcgaagctgaacggacgagtaacaaccgcgatggtgagagcaccctgttgatgagccgcacgagcgacgatcgggctggcgccagtaccggtgccaccgccctcgccgcaggtgacgaacaccatgtcggcacccctaagcgcctcttcgatatccgactggtggtcctgggccgccttggctccacgctccgggtcggcaccagcaccgagaccgcgactggacttatcggaaagggaaatcttgacatccgcatcagagcgcagaagatccttcgcatcggtatttaccgccacaaattcaacattctgtaatccctcggcaatcatgcgattgacggcattaccgccggcaccgccgacgccaacaaccttgatgttggtcttgtcgttgaactcattctgcgcgatctcgctcacgtttggctcctgtcacttcacggttacacccaagagtagcgcaaacaggctactcttggagggaaattcacgcgcagaatggcgcgtgttgcgtgtattttcagtattttctcagtaactggcgtccattgggtcgtcaccgaagagcgcctcacgctcttcgtgggtggtggtacgcgattccaaccagccatacggcaagtgcaccttcttggcgaaacgcacgcggccgcgcggtttgtcgaccacgcgtggcgggtattcgatagtcgggtcgagcttgccgatctcgcggtccacatcggccaggctctcgcattccataaaggccttgcgggtggagccgcccaccgggaatcctttcagataccaggcgatgtgcttgcgcagatcgtggacggccatcatctcatcgccctcataaaactcggtaagcagctcggcatgacggtgaatcacgcggcagacctcgcccagattcgggttgagccgttcgggattgccctcgaaggcgtttttgatgttggcgaacagccacggccggccctggcatccgcggccgatggccacaccgtcgcagccggtctcgcgcaccatttcgagcgcatcctcggcaccccagatatcgccattgccgaataccggaatgttgaggtgttccttgagctcgccgatgcgggaccagtcggaatgaccgccatagtattcggcggcggtacgggcatgcagggttacggccttgcagccctcctcctgcgcgatgtgtccggcttcgaggaaggtctcatggttatggtcgatgccgacgcggatcttcgcggtgacggggatgcccgccggctcgcatacggcgaccacgcgctgtaatagctcagtgaaaatgtcggttttccaaggcaaggccgaaccaccgcctcgacgagtgaccttgggcaccgggcaaccgaagttcagatccacatggtcggccatgttgccgtcgaccacgattttcgccgcctgttcggtgatggaggggttcacgccgtacaactgcagtgaacggattttttcgcttttggcgaaatgacagaggcgcagtgctttcgggttatgcgccacgagggctcgagcggtgatcatctcggccacgtagagtccatcgggaccatattcctcgcaaatcacgcggaagggccagttggtcactcccgccatcggcgagagcaccaccggggtcggcacggtgatgttgccgagttggaccggggcgatatgcaccggggtcccggggcgcgccggcgcgtccgtacgtgggtcgaggttgtcggtctcgtgatgctcggtgagcactgtttcggattcggattgtgccatgtgattcctaagaaaataagtaggggctcccctgagagaggagccccggcgtctatcgccgccacttcgcctacaaacagcccactgggatgtcttccttacggctcagcccacagaggggagcccaagttgtgcgactccggcttagtacaggccgccggcttcctgaacgccggactcaggccaaggctcaccacccatttccacaggcttcaggggcacgcgggtgcgcttctcgccgatgcgggcggccacgtaatcggccaccttgtcaagagcgacgcgctcctgggccatggtgtcacgctcacggatggtcacagcgtggtcctcgagggtgtcgaagtccacggtgatgcacagcggggtgccgatctcgtcctgacgacggtaacgacgaccgatggcaccggactcgtcgtagtcgatcatccactcgttgaagcgcaggtcgtcggccaggttctgggccacggtctgcagttcaggcttcttgctcagcggcagcacggcggccttgaccggggccagacgcgggtcgagacgcagcacggtgcgcttgtcaacgccgcccttggtgttcggggcctcgtccacatcgtaggcgtccacgaggaagcacatcagggagcgggtcaggccggcggccggttcgatgacgtacggcacgtacttctcgccggtggcctggttgaagtagctcaggtcttcgccggagtgcttggagtgcgcgctcaaatcgtaatcggtacggttggcgatgccttcgagctcgccccagtcggaaccctggaagccgaacttgtattcgatgtccacggtgcgcttggagtagtgggagagcttctccttcggatgctcgtagtggcgcaggttctccggcttgacgccgaggtcgatgtaccagcgggtgcgggcgtcgatccagtactggtgccattcctcatcggtgccgggcgtgacgaagaactccatctccatctgctcgaactcacgggtgcggaagatgaagttacccggggtgatctcgttacggaaggacttacccatgttggcgatgccgaacggcggcctggaacgggaagaggtcatcacgttcttgaagtccacgaagatgccctgtgcagtctccggacgcaggtagtgcaggctgttctcgtcctcgaccgggccgaggtgggtgcgcagcatcatgttgaagtcgcgcggttcggtccactggccacgggtgccgcagttcgggcagacgatgtccttcatgccgttttccggcatcttgtcgccgtgcttctcggcgtaggattcctcgagcttgtcggcgcggttgcgcttgtggcagttgagacactcgacgagcggatcgttgaacacgctcacgtggccggacgccacccacacttcgggcggcagaatgatggaagtgtcgacaccgacgacatcaggacgggtgacgaccatggagcgccaccattcacgcttgatattgtccttgagagcgacgccgagagggccgtaatcccaagcggaacgggtgccgccgtaaatttcgccggcggggaacacgaagccgcgacgcttcgcaagggatacgacttcatcgagtttggactgagccacaatgcaccttctggtttgaacggtttggggtctaataacaaccgcttcaggatagccgtatatggtgacaggtcaggcggcattgtccggtatatgttccgcgtctcacgagcggccgttcgcagcgattcctatatcgcaacacctccatattgttcctgttgttttacccttcccgaatttgtgccactgacatcgcgtcagcgtcacaaattcgggagatgttgctcggcggaggcgtctatgtatcacgaatggacggggacgcgccagacctgacgacacgtatcgaacaaatccgtcacgataatgtccatgttggcgcatagcgtcggcactgtaatgcaggggaactcgcatgtggttcgcgagttgagaaaggcctgagcctgacccttagaacctgttggttaagaccatcgtagggagcagtaaatgagcaatagtgcatcatcgtttaccggcgtgtccagcggttataccgccgggactccggttccagccgattcacccatccgtgacaatatcgccgatgccgttcgccgcgtacgcgagacgactccgttggcccagtcattcaccaattttgtgaccatcaatttggttgccaacgcgcaactggcggccggcggcactgcggccatgagtttcctgccggacgacgtgatcgaaaccgcgaaaatcgcgggcgcgaactacatcaacgtgggcacgctgctgccgttctataaggacgcactgcccgaaatcgcccagcgactcaactacttggacaagccgtgggtgctcgacccggtggccgccggcatcggccgcacccgtaccgccattcttcaggccttcaaggccgctcccccgaccatgattcgcgcgaatgcatccgaggtaatcgcgctggcgaacatgtgggggctcaataccgaaaccgtgggggacgcttccgagcaccgccccgccggagtggaatccgtcgacgacgtggagtccgcaaccggcgcggcggtggcgctggcacagtatctgaccgaacagcacgccaagcattcctcccatgacgcttccacccgctgcgccgtggccgtgtccggcatcgccgatctggtgaccgatggcgaaaccgtgtaccgactgccgggcggcagcgcgatgatgaccaagatcaccggtgccggctgctcgctgggcggcgtggctgccacgtatttggcggtctccgatccgttgaccgccgccctgtccgcgtctctgctgtacaaccgcgcgggagaggtggccgatacaacttcgcacggaccgggctcgttccaagttgcgttccttgacgcgctgtggaatgtgaccgccgaacaggtggcggaatccgagattttggtgcagtagtttcagttccctctgatgagggagctcataacagttttttccaataagacttccacaagaaacaacaaaagcaggaataataatgagtaatgaatacccatacgcctccatgcgcgacagcttcgacctgtccgcgtacttcgtggtggggccggaggactgcaaaggccgtccgctgaccgacgtggtggatcaggctctgcgcggcggcgcaaccttcatccaactgcgcgccaaggaggccgatgcctctgagctgaccgacatggcccgcgacatcgcgcagatcatcgaggacaatgagaagtccgattccgtggcctttgtgatcgacgaccgtgccgacgtggtgtggcaggcccgccgcaagggcatcaaggtggacggtgtgcacatcggccagaccgacatggagccgcgcgaagcccgcgccctgctcggcgacgaggccatcgtgggcctgtcggctgagaccgaaagcctcgttcggctcatcaacgagctgcccgacggctgcatcgactacattggcgccggtcctctgcacgtctccaccaccaagcccgaggcttccgtgggcggcaacgacggctccggcaagacgctggacgccgcccagatcaacaccatctgcgttgccagcgaattcccggtggtcgtgggcggcggcgtgaccgcagccgatatggccatactcgccgataccaaggctgctggctggttcgcggtctccgccatcgcgggtgccgagaacccggaagaggccgcgcgcaccatggtcgaaggctggaaggccgtccgcggcgacaagaagcacggctacgcgccgcgcgtcgtaacccacacccccgctactgacactcaggctgctcaggaaggggccgcgaagcccggttccgaggccactgagaagaagttcaccaacgccaaggacgccaaggatgcccagaagcttgccaagcagcagcgcgtggacatcgccgcccgtggttccaagcagcgcgacaaggcgcacatccgcaagaccaagtccgtaccgttcacctatcagtatggttcctacgacctggaagtgccgtacaccgaaatcaagctgagcgacacgcccggcgtgggcccgaacccgccgttccacgactacaacaccgaaggccccaagtgcgacccgaaggaaggcttgaagcccctgcgtctcgactggatccgcgaccgcggcgacatcgaagactatgagggccgccgccgcaaccttgaggacgatggcaagcgcgccatcaagcgtggccgcgccaccaaggaatggcgtggacgcaagcatgagccgatgcgcgccaaggaccacccgatcacccagatgtggtacgcccgccacggcatcatcaccccggagatgcagtacgtggccacccgcgagaactgcgatgtggagctcgtgcgctccgagctggccgccggccgcgcggtgatgccctgcaacatcaaccaccccgaggccgagccgatgattatcggatccgccttcctgaccaagctcaacgccaacatgggcaactcggccgtcacctcctccatcgacgaggaagtggagaagctgacgtgggccaccaagtggggcgccgataccgtgatggacctgtccaccggtaacgacatccacaccacccgtgagtggattcttcgcaactcccccgtgccgatcggcaccgtgccgatgtaccaggccctcgaaaaggtcgaggatgatgcctccaagctgagctgggaactgttccgcgacaccgtgatcgaacagtgcgagcaaggtgtggattacatgaccatccacgccggcgtgctgctgcgttacgtgccgctgaccgccaaccgcgtgaccggcatcgtctcccgcggtggctccatcatggccgactggtgcctgcgacaccaccaggagagcttcctgtacacgcacttcgacgagctgtgcgacatcttcgccaagtacgacgtggcgttctctctgggcgatggcctgcgccccggctccctggccgacgcgaacgacgccgcgcagctttccgagctcatgactctgggcgagctgaccgagcgcgcctgggccaaggacgtgcaggtgatgatcgagggcccgggccacgtgccgttcgacaccgtgcgcatgaacatcgagctggagaaggccgtgtgccacaacgccccgttctacaccctcggaccgctgaccaccgataccgctccgggttacgatcacatcacctccgctatcggtgccaccgagatcgctcgttacggcaccgctatgctgtgctacgtgaccccgaaggaacacctcggcctgccgaacaaggatgatgtgaagcagggcgtgattgcctacaagatcgcctgccacgccgcagacatcgccaagcaccacccgcacgcgatggatcgcgacaatgcgatttccaaggctcgcttcgagttccgttggctcgaccagttcaatctgtcctacgatccggacaccgccatcgccttccacgacgataccctgcccgccgagccggccaagatggcgcacttctgctcgatgtgcggcccgaagttctgctcgatggccatctcccagaacatccgcaaggcattcggtggcgaggccgctcagcagcaaatcgtgaaggaggctgctgcaggcatcgactccgaggcactggctacggccaaggccaatgtcgataacggcgtggtgtccgccaacgtgctcagccccgaagaaatcctcgccggcatggatgcgatgagcgaaaagtacaccgcccagggcggcaagctctactccaccgcccaggagtaaacctctctggctcccctctctgaggggagccaattattatgcccggtggtgtcttaattcgggacgacgctcgactcgctcgaaggcggtgccgaagtgtgcgccatctggaccgaggccgtcggaagtctccaggaccacgccttcgttgagcgcacggcgcagtacatcgttatcagccatgtcccctcccgaacatttcatgaatcaatcgcaatcagcaaaccttccccatctcaccacaggagcggcaaaacatcaaggaaaaccgctccgaaaaacatcatgggccccacttagaatgaacactatggcacaaattgcaacatctacacttcccgctgttctcgcgatctccggctccgactcgtccggcggtgccggcatgcaggccgatctgaagaccatgctggcctgcggcgtgttcggcatgagcgccatcaccgcgctcaccgcacagaacaccaccggcgtgcgttccattcaggacaccaaaccggacattctcgccgaccagatcaacatggtgtttgaggatattccgccggtcgcggtgaaaatcggcatggtgtctgccactgacatcatcgacgtcatcgctgaacgactcaccttccatcacgccacgaacatcgtgctcgacccggttatggtggccacttccggtgccaatctcatcagtgacgatgccactgcggcattgaccggcaagctgttcccgatggccacggtcgtgactccgaacattcccgaggccgaagtgctgaccgatacgctgattcgcgatcaggaggatatggaggccgccgcccaccgcctcgtggagcgttatggctgtgccgcgctggtcaagggtggtcatggcaccgaggatgccaacgatgtgcttgccgagacggatggaaccgtgacctggtttgatggcgcgcgtatcaataatccgaacacgcacggcaccggatgcacgctgagctccgccatcgcctcgtatctggcgcttggcgacacattgcccaaggccatcaagcatgcgaagaagtatctgaccggtgcactgaaggcccagctgaatcttggccacggctccggcccgatggatcatttctggaagtatcgctgagtcctactggctctcctctctgaggggagccaagtaataaaaggagaattatgattattgaccgtaatgccgttactcaggaagtgccgatcgacccggaaaccggcaaaccgtacctcaataccgtggccgccattcaggtgtcggccaatggcgtgggctccgaggtttcgccatacgtggctcaggccgtcgaggtgattcgcgaatccggcctgccgcaggaaaccaacgccctgttcaccaacgtggaaggcgatctggacgacgtgctcaaggtggccggtgaggccgccaagaagctcgccgagcagggctaccgcacttctctggtgctgcacatggatatccgccccggcttcaccggccagctgaccgaaaagcccaagctggtggatgagatcctcgccgacaagcaggcgaagtagcaaagcatcgcttccaccagcaagggcatgctttgttattacacgtttcatggggcggtagctcacccatggggtggtaaaaccctcatggggcggtagtcgaaaacggctctattctgcggaaaggcataatccgctaaccgccccatgggccaaataccgccccatgagtgttttaccgccccatgggaatcacggttctgccttctttcgacggggtaagagcgtaagtggggcatatataggagcgtcacaacctctgttatcgttcacgatgtgaccgcaacgcggcgtgccacaaaatcgaacctatagttaagccccatgtagtgagctatctcacaacgattggctcgctacgtagaattcaagacttggatcgcaaacgtcgttcatcccacacaatgggagggcgaacggaacacacagtccaatcaagagttcgctcgccgcaacaccattgagcagttgcacgcgggcaggtttgcaagaagagggctcaaatatgactgctgctgaacagcagatttccggcaatcccgcggctatggaaaacgcacaagcacgtaccaccgtgacggatcaagccaaggttcaggatattatctcgcgcatggatcgcgcacatgaaaccccgatgttccatcgcatcgtgacgctggtcgccgctggcatgctgatggacagcatcgacgtatatattggcagcgccgtcgcctccagcacgttggctacccgctggtccaccgttgcgcaaaattccacctttatgtccgcgggcttcctgggtctgctggtcggttcgctgctggccggcttcgtcggtgacctgaagggccgccgcgtggcttaccaaatcaacctgctgctgtttggcggcttcaccttcctcggcgcattcgccccgaacatggctgtgctgtccctgtgccgtctgggtgccggcctgggcctcggcgctgaaatcgtcaccggcttcgccatggtcaacgagttcgcaccgatgaaccgccgtggccactggtgcgcgattgtctcgctcgtggccaactgcggtgtgccaatcgctatgctgctgtgtgcatggatcatcccccgctggtcctggcgtccgctgttcgtggccatcggcctggtggccgccatcatctggtggctgcgccgcgacatccccgaatccccgcgttggctcgccgtgcgcggccgttacgatgaggccgacgccatcgtcaagcagcttgaggccaacggttccgaaccgatcgacgcagccgccaaggccgacaccagcgacacccgcaacgccggaggccgttcgctcggcatctgcctgcttgtggctgtggttgctgtggccgccacgaacgtgtgctcctacgccttcacttcttgggttccgacgattctggtcaagcgtggtattaacctgtccagctcgctgctcacctccacggtgatgatgctcggtgccccggtcggctgcctgattggctctctgcttatcgaccgtatcggccgcaagcgcacgattgtgccggccttcctgttcactggcgtgttcggtttgatgtatgccttccagacctctaccgtgagcgcaattatcgttggcttcctgctcatgatgtgcctgtacgtgcttatggcttccgtggtggctgtgtacgctccggaactgttcgccaccaaggttcgcttccgttgcgtcggcttcgcgaacgccgtggccaagctgctcaatgtgttgatgccaatggtggtgggctggatgcttacctcgcttggtgccacgtccatctttgtggccatcagcgcgattgctattgcatcgatgctgattgtcggcttctttggcgcggagactgcgcagaagtcggttgggtgatcggtttcctcacagtggaataactgctgataatgtccattcggcgtcttgcgtggtgatatgcagggcgccgttttgttgttctagtaattgttggtaacggttgaggccggtgccggtggataggtctgcgtctccagcggacaatcagcgtctgtgatgtcacatgcaatgccaggagcggcatcaacggtcgaatcatgcggagtcactgcactgtgcgccgcttctcccctgccttcaatcacatcaatgacttgatgcgtgcgatccaatgcgcccatagacatatccgtaaccagcacgtcaggccgcttggtggggctcaggcatcggctgatggccacagcacccaaatcgcaggtctatatcacggcaaaatcgctggacatacgttcgattagcgcgccgaacactttcagcgcatatgggtcattgtccacaatgccgatgcgtatgttgcggttgcgcgcttcttccattacattcaccccttcagtgtgcccgacgccgaactactccgtcctgacacgtcatggtcactatgacaactatcattccacatttcctgcgtgatttacgatggaatcatcatcaatccttgacaaggcggtaaaggaggacggcaatgaaccgtgcacaagcactcagcaagctcaacaggagcgatatgcgcaatgccgccgccgagcgcgggatgcaacgactgttcacatggaaccgcgcgcattggattggcatggttgtactgatagcggtgttgctgctactgcagtggagctcatcaatgtatctcatgcccgacgaggttcttgacagggctgccaaaaacctgttcgtatggttccccggtatggttctgcactggccattggtgttgggaatcaccaacttgatactcggttcgacacgatccggcagtctgtctttcccgttggcgagcgcaatcatcggaccactggcattcggctggaccaatcttcgcttacggccggggttcccataccgttcctgggctcaagggaaagccgcaatataatgaaaacagcgatttcatgcaatgatgcacgagccgatccaagcaaaggggccaaccatgagcgagcaactgatggaacagtaccggttgcgcggacaacgcaaatgccgtaacgcttgtatcgccgccatcgtgacagtagtgcttgtccttgccgtcgccggcggcgtatggtggacggccggcgatggcagcgcattggttcgcaatatgttcaagccgaaggccacgcctgccacgcagccggtagtcaacagcaccgcaaccttcgcctaccgcaccgcaccggaattcctggcgatggaagccggcgaccgaggcaccggcaatgtgaactactctcctgcttcgatgtggatggcgttggccatcgccgcgcagggcgccaatggcacgacccgctcgcaactgaacgaactgctgggctccggttcgctgaccgatagcgactaccaatcgctgctaagttcgatcaacgggcaatattcgggggcgaaatccgagatgagcgccgcgaactcgctgtggattgatgacgactactctcttgccagcgattaccaatccaccgtcaagaagatgttcgaggccgaagtcaccacgttaccgttcgacgatcaggccgccgcaaagatgtccgattggatcgccaagcatacgaatggttcgctcaagccgaagatcacgctgcgtgaccgtgaagtcctgtccatcatcaacaccgtctatgcggatggccgttggaaggatccgttcgaagagcagtccaccggcaacggcaccttccacggcgaagccggagatgctcaggtgccgatgatgcaccggaccttcagccaaatggcttacggacatgatgagtacaacacttggcagcgggtggagattccgttcgacaacggcggcaatctggccatcgtgctgccggccgaagggcatttcgacgagttggccggcgatgccgagaagctcagttgggcgttcggtacatgctcgacggcttcccttggcgagggcgcaatgggttgcgccgcggacagtatgcccggatggggcgtctccgtcaactcggtcatggtgaacgtcacgctaccgcgattcaccatcgacagcatgttcgactcggaagccaccatcaaggcattcgaaaaactgggggtgaccgatgcgttcagtgcaggcgacgccgacttcaccaagatgatcgacaccggttcgcacggcgagaacctgtatatcggctcgattctgcaaggcacgcgcatcgaggtgaacgaagccggcgccaaggccatgtccttcaccaaggtcggcgcagactccgttagcgcgccggtggacaacgtcgagttcacggtggatcgcccatttctgtattcgtacgtcaccccggacggcataccattattcatcggtgcggtgcgcaacctcggcggagtcggtggagaaaactgatactttcctggcagtccgtcaattagggtgtatcgtttgacgcatggttacgatgaaggaaatcgcgaacaaggcgggggtttccgtctctacggtgtcgctggtgctcaacggacacgacgaggggcgcgtaaagtccaaaattgcggacaatgtacgcgccatcgccaccaagctcggctaccagtcgaatccgctggccagttcgctgcgtacaggcaggacgcacatcctcggtttcatcagtgaggaggtggccaccaccccgtacgccggcggtatgattctgggcgcgcagaccgctgcaagccagttcggctatatgctcatcaccgtgagcaccgacggcgagaacagcgagagcgaggaaatcgccgcactcaagcgatacggcaccgacggctttctgtacgccaagatgtcgaaccgcatcacccatgtgccttcctcgctggccaagacgccactggtgttggtggatgccaccgactcgcttggcaaaatcccgagcgtggaaccggacgagttccaaatcggctacgacgccaccaccagattggttaaggccggatgcgcacgtatcgcctatgtgggttgcttggagccgatgattgcgcaggacgatcgtttggaaggctatcaggcggcgctcagggacgcaggcctcgactatgacgatcatctggtcgtcaatgtgctcaacaacgggccggcactgaccgcagtcagcgatttgttcgacgccgagcatccggacggattcttctgcttcaacgatgcccgcgcctggtatgtgtacgaatgcgccgcacgccgaggactcacggtcggcaaggacatctccgtggtcggcgtggacaaccatcgcgtgttcgccgaaacgctggaaccgacgctcaccactgtggaactgccgcatttcgagatgggctactgggccgtggccaagctggtgtcgattatcgaaggacgctcgatggacgacgtctcatggccagcgaccaccgctcccctgccgccgatcgacgcgccgattccggcgaagatccactgcacgctgatcgaaaaggcctcggtgaagtaaccgagtcccacacgatttctcaaggcctccgttcagcacggaggccttttgcgtgtcgaacggatacgacacgccgatttacgtcaatcgattgacgtaaatcgattgacgtcgcataataattactacgcaacaacttctacaaaggcacggccgcccgagcagaagcgttacataaccaataaccaaccaagtagtaatcaaaggatgattatggcaagtgcaaccaaatctgcatggaagaatccttcctatctgcagagctctttcggcatcttcatgttcttctgctcctggggcatctggtggtccttcttccagcgctggctcatctcaggcgttggattgaccaatgctgaagtcggcaccatctactccatcaactcgctggccaccctggtcatcatgtttgtgtacggcgtgattcaggatcagctcggcatcaagcgcaagctcgtcatcgtagtctcggtaatcgccgcctgcgttggcccattcgtccaattcgtttacgccccgatgatcctcgccggtggcaccacccgctggatcggcgcactcatcggctccatcgttctgtctgccggcttcatgtccggctgctccctgttcgaggccgtcaccgaacgctactcccgtaaattcggtttcgaatatggccagtcccgtgcttggggctccttcggttacgccatcgtggcgctgtgcgccggcttcctgttcaacatcaacccgctgatcaacttctgggtcggctccgcattcggccttggcatgctcctcgtgtacgccttctgggtcccggccgagcagaaggaagagctcaagaaggaaaccgacccgaacgcagcccccaccaacccgtccctcaaggaaatggtcgccgttctcaagatgccgaccctgtgggtgctcatcgtcttcatgctgctgaccaacaccttctacaccgtgttcgatcagcagatgttcccgacctactacgccaacctcttccccactgaagaaatcggcaacgccacctacggcaccctgaacggtttccaggtcttccttgagtccgcaatgatgggcgtggtcccgatcatcatgaagaagatcggcgtgcgcaacgctctgctgctcggcgctaccgtgatgttcctgcgcatcggcttgtgcggcgtgttccacgacccggtcaccatctccatcgtcaagctgttccactccatcgaagtgccgctgttctgcctgccggcattccgctacttcactctgcacttcgacaccaagctctctgccacgctgtacatggtgggcttccagatcgcttcccaagtgggtcaggtcatcttctcgacccctctgggtgccttccacgacaagatggctcagattctgccgaacaacgacatgggatcccgcgtgaccttctgggtcatctctgccatcgtgctgtgcgcactgatttacggcttcttcgtcatcaagcatgatgatcaggaagtcggcggcgacccgttctacaccgacaagcagcttcgccagatggaagccgccaaggcctgaaaggacagccatgactgacttcactcctgaaacccctgttctcacccccatccgcgaccatgccgctgaactggcaaaagccgaagccggcgtggctgagatggccgccaagcgcaacaaccgctggtacccgaagtatcacatcgcctccaacggtggctggatcaacgacccgaacggcctgtgcttctacaagggccgttggcacgtgttctaccagctgcacccctacggcacccagtggggtccgatgcactggggccacgtctcctccaccgacatgctcaactggaagcgcgagcccatcatgttcgcaccgtctctagagcaggagaaggacggcgtgttctccggttctgccgtcatcgacgacaacggagaccttcgcttctactacaccggccaccgttgggccaacggccacgacaacaccggcggcgactggcaggtgcagatgaccgcgctgccggacaatgacgagctcacctccgccaccaagcagggcatgatcatcgactgcccgaccgacaaggtcgaccaccactaccgcgacccgaaggtctggaagaccggcgacacctggtacatgaccttcggtgtctcctctgcggacaagcgcggccagatgtggctgttctcctccaaggacatggtccgctgggaatacgagcgcgtgctcttccagcacccggatccggatgtgttcatgctcgaatgccccgacttcttccccatcaaagacaaggacggcaacgagaagtgggtcattggcttctccgccatggggtccaagcccagcggcttcatgaaccgcaacgtcagcaacgccggctacatgatcggcacgtgggagccgggcggcgaattcaagccggaaaccgagttccgcctgtgggattgcggccacaactactacgccccgcagtccttcaatgtggacggccgtcagatcgtctatggctggatgagcccgttcgtgcagccgattcccatggaggatgacggctggtgtggccagctcaccctgccgcgcgagatcacccttggcgatgacggcgacgtggtcaccgcgccggtcgccgaaatggaaggcctgcgcgaggataccctcgaccatggttcgatcacactcgacatggatggcgagcagatcatcgccgacgacgccgaggccgtggaaatcgaaatgaccatcgacttggctgcctccactgccgagcgtgcgggtctgaagattcacgccactgaggacggtgcctacacctacgtggcttatgacggccagatcggccgcgtggtggtggatcgtcaggccatggccaacggcgatcgcggctaccgcgccgccccactgaccgacgccgaactggcctccggcaagctggacctgcgcgtgttcgtggatcgcggctccgtggaggtctacgtcaacggtggccaccaagtgctgagctcctactcctacgcctccgaaggcccgcgcgccatcaagctcgtcgccgagtccggtagtctcaaggtggattccctgaagctccaccacatgaagtccatcggactggagtagctctttcacctccctctgacgagggaggtttttttgtgcgccctgtcgttcgccttcgcctatactgatggacggcatataacacaatccatcacacgaccggcaggcgcgcaggctcctcaccttactgttccacgccccggccgcaagcgccaccagcaaaccggactggcgcggaaagcaaggtgacatcccatgtccatcgccaagcgcctcaagcgccgcatgcccaccgtcatcgccgtcatcgtattgctggcagtctgggaaacgtgggtggatctaggacatgtctcccccacgatgatctccgcgccaagcgagattttcgccgccaccatcgaaacatggaacacgctcggcccggccgcggcaatcaccggctatgagggcgtggtcggcttcctgtttgccgtgttcttcggcattatgatcggcattgcactgtactgctcgcacacgttcaacgcggcgttctatccgctgcttgccgccgcacaaaccatgccgctgatttccatcgccccgttgttcctgatttggttcggttttgagatttccggcaaaatcgtaatcgtggcggtattcggcctcttccccatcgccgtgcagactgtgcgcggactagaagcagtgccccagttctattccgacgtcgcattgacctgcggcgcgaccccggtctggacgctctggcacgtgaagctgcgcgttgccgcacgtcagatctatggcggtatccgagtatctgccgcatacatcttcgccacggcatctaccgctgaataccttggcgcacgcaagggcctcggcatctggctgcaggctgcctacaattcattccgcacgccgctgatcttctccgccaccatcgtcattatcctgatgacatgcgtactgatgctggcggtaaacgccagcgagcgcatcctgctcggcccggccggcgatgacgaagaccccgacgcggaccagtagttctttttttaccgtcaaaggcacgagccggcggccaggaccgactgaacgaagcggcttctcatgaggtctccaaccctgtctctataatggaacagctttaccagcgtgtggcaaaccggctttcccgagctttcatagggaatgtcgggggcgctggtcgaacggaaatcaaggccctccatatcgttttctgccgacttccgttcgaagcaatcccagagaacgatagagagacaacgaattagggaaccatcattatgaagaaaagccttgtatccaaggccgctgccctcgtgggcgcccttgccatgactttcggtttcgccgcatgtggccagaccaacaccgccgactcctccaactccaacacctccgacctcaagaaggtcactttcatgctttcctgggcacccgataccaaccacatcggcgtgtacgtggccaagaacaagggctacttcaaggacgccggccttgacgtggatatcgtggccgtggcccaggccggtgccgaacaggccgtgaacaacggtgtggccgacttcgccctgtccaacctgaccaacgtgggcgtctacacgctgaagggcgctcacatcaagcaggtgctgcaggtgcagcagaagccgagcgccatttggtgcgcactggcgtccaacaccgccatcaagtcccctaaggatttggatggcaagaccttcgccaccttcggctccaacgagtccgatgccgtggtgcgccgcatgatccaaaccgatggcggcaagggcgaattcgacaaggtgaccgtcggcacctccaccttccagaccatggaatccggcaaggccgatttcggcggcttctacgccacgtgggaaggcgtgcaagccgacatgtacggcccgaagctcaactgcttcaccgagcctgactatggcgtgcccggcaacgccgacaccatcggcatcatcaccaatgacaagaccatcaagaacaatcccgacctggtcaagaagttcactcaggccactcaaaagggttacgagtacgcgtacgccaacccggatgacgccgcgcagattctcgtggacgaagcccctgacgccaacctcaagcccgaattcgtcaagaagagcatgcaggttatcgtcgacggccagtactggggcgatccggccaagatcaaggacggctctttcgtgctcggcaccaacgacttcaagggcgctcaggaatacttcgacttcctggctgaagaagacgcatacaccgacagtcatgacaagataattcatgaggccccgcaggccaaggaccttgccaccgacgaattcatcggcaagtaatttccgatattccgagtttgaatctacgcaaaaatgcgtccttcccatgaggaaaggacgcatttttgcgtatcagccgataaggttattcatagcggatcacgctaacaaggagacgattctatggtccaatgtcctgaccgcattattgccagcatggatacgggtgttgatgatgcgttggcgttggcgtatttgttggggtcggcggatgagtgcgagttgggtggcgtgattgccggttatggcaatgtggatgcggacacggcttatgccaatacttgcgcggtgcttgatttgtttggtcgggcggatattccagtgtttttagggtctgagcatccttcttgggctgatgcgtttattcctgatgcagggtgtgcccagttccatggggatgatggactggggaatactcggctggcagggtccggggctctggctgatggagcttgtgtgcctggtgatgatatgtctgtggatgtgcccgatgaggttgtttctgttggcgggtatttggcgggggatgttcatgctcatccggcgttgggtgcttgttctcgtgtgaaccgctctcggtcggtgggccacccccagtcggctatgccgacagctctcgccagcgggggcaaaaggagatgctccgttgatgctgcggatgggattgagtatctgattgagcaggttcgcgagtttggtcgagacgttaccgtgctgtctaccgggccgttgacggatgtggatgcggctattactcgggcaccggatattgcgtcgaaactcaggctggtgatgatgggaggtacgcttacccaacccggtaattgttgggatgcggtggccgagacgaatatcatccaagaccctgaggccgcgaatcgtgtatttcattccggcgcagacatcacaatggtgggacttgatgtgactcaccagtgtttgctaacgcgatcggcggccgaccggtggcgtgcgacggggaccaagcgcgggcggttcttggctgatctcgcggacttttccatcaaggcaaatttggaagccgacaccgcactgttctctggcggcatgccgttgcatgatccgttggcggcggcggttgcacttgactcttcactggtcgattgttttgatcttgcgttgcgcgcggagaccaataccggtgatttcaatggagtacgaggccggaccaccggagacccggttgggctggtgaatcattccatgccgcatgtgcatgtggcacttggtgtggattcgggacgttttttggatgagtttgcagagaggatggctgaggtgtgccggtaactcccctcagtccgctacacggacagctcgaccgcaattacggacaagctgccgctcgcattcttctggctcgactctcgtctcgccttcgcctacaaacagaccaggctgtttgctttacggctcagcccgtcagagggggcctaacaaggactatttcacacccccagcaatcaaggaccggcttcgccggactcatcattacctggtcatgtcctatcggcctcggccaggcggcgtgaacgaacagtccaccggactgttctttatttcacgccgccaaatcggcgatcgcggtggatgtaatggtcgatggagcgccatagcacgtcacggccgcagtccgggaagagttcgggcacgaagtcgagctcggcgtaggcggcctcccacggcaggaagttggaggtgcgctgttcgccggaagtacgaatcaccaagtcgcaatcgggaatgtccggattgtacaggtggtcggcgatcatcttttcagtcacgcggtcgccggaaatcttgccatcgcacacttcgcgagcgatggcggcgcaggcgtcggcgatttcagcacggccaccatagttgatgcagaacaccacatcgatgaccttgttgttcttggtacgctcctcggcggcctcaagctcgtcgattaccgacttccacagcttggggcgacggccggaccagcgcacgcgcacaccccactcgtccatctgttccacgcggcggtggatgatctcacgcgagaagcccatgaggaagcgcacctcctgcggtgaacgcttccagttctcggtggagaacgtgtacaggctcaaatagcgcacaccggcctcgatggcgccggcgatcgtgtcgaacaccaccggttcggcggcctgatgcccattggtgcggatcatgccacgctgcttggcccaacgaccgttgccgtccatgatcacgccgatatggcgaggcactttgttcttggggaagtcaggaatacgggcggggtcgctgaatggggccgcggggatgttcagcgaggtgtaatcaacgttctcaaaagccatacctacgaatctatcaagcgcagcgaacgaatcggccgttcaaggtaatactccccccaatcttcaaccaactcccgtacgacccgctccaccggtgcggcgtcaagcaccgtccaatcaccatggaccagcgcatcgaactgacccaatgcggacggcgcgatgcgacgcgcgtccgtggtgtggtcggcctcgcacatcacgccgccggatgcgatcgacagatacgccggcgccgccgcaccgcacaccacgcacgtgcccagacgcggcgtccaaccggccagcgccagggcgcgcatcacataggagcagcctatggcctgcggggcgtgggcgcgtttggcgagcgcgttcaacgcgccgatcaggagccgatactggtccgtcatgcgctcatgttccgtgccgacgagcttgtcgatggtttcgacgatgacgttcgcggcctcatacgccgcatagtccccgacgatcgcggcaccgtacgcggcgatcgactcggcctgggaaaccgtatccaacgatcggccttcggcgatcagcagatcgacgcgcatgaacggctcaagccgggcgccgaagcgcgatttggtgcggcgcacgcccttggctaccgcccggatcttgccatggtcgcgcgtcaggacggtgatgatgcgatcggcctccgccagcttggacgtgcgtaacaccacgccttcatctcggtacagtgacatttcgttccccttgcggcgggacccggtgaacggcgggcacccggcgtcgtcgatcagtagacgaacagtccccagaaggcgaacaccaggagtatgcacagcatggtgaacgccaccagccagaacaggatccggcccaggcgggtggaggcaagcaccggatcggtaccggtgacgatgtcccgcacggattcacgccgaggaggcagctgaatcaagccgcggatggaagcgacttcgatcaggtgcatgaacacacgggaccacgcccacaacaccagcaccgacaccacttggatgaccggccagctccagtacatgacgcccggcgtctccgtgggtgcgccgccccacgcgagtctgaccacgcccatgatcacctggccgaggcccgcgccgaagatgagcagcgtggcgagcgtggtgagggtcaacgtcagcagcgcattgccgaaaccgtggacgaagcccagcacctcgggacgtctcggcaccggcatgcccgcacgcttggcctcacgcctgtcccgccgccaccggatgtccgccgaggccttgcggcccaacgccaccagcgacagtacgatggacgccaacagcagcagcatcactgcggcatgcaggatcaccccgtagatggtgccggcgcggcggggtttcagggcgcccggcaggccgaccgattgatacaggtcggtgccgcccgccttctcgctggtctgcgtgagtccggccgaagtgccgacggcccagtcgatcagatcgtcgacataggcgtcggcgaacggggtgccggcctgggattcgtctcccaggcgcagcacatggttggcgaccggatagctgcgtatggtgacgttccaattgccggccttgtgggcgttgtcgagaatcgcccgcacaccgtcgacctgtgcggtcatcacgtccttcgaaccgtacgccacgtaggtgggcacggcgtaggcggccggcctgagcgtgtcgagatcgagattggtcagtccgaacagggcggtgtccgcgctgaacacgcgctggacgatggactggtagcctttgttcgcgccgacgagggtgaaatcctgcgtgatgaagaatcccagcgattgacgtggactgaacaccatcgggctcaggaggatctggaaggcgatattcgggtcgtcctgcaggagatacgaggaaatccacgtcgattcggaggtggcgtagatgcccaccttggcggcgtcgacgtcgttctgggcccgcagatagtcgatgacctgatcgtaggctttggcggatgccgggtagtcgcgcgtgacgtcggtggtgttccacacgggcttgtcaatcacggcggtcacgaatccggccgaggccatgtcggaggccacgtcgccgaaggagttgtcgcaggtgccgaagccggcgccgtgcatgaacaccacgcccggtcgcgcgcccggcgcgttcctcggcgcccgaatcagcaccctgatggcctggatgccatccttgttggctttgccttgcgcgcccggctcatcggtcagctcgccatcgtcggtcatgttcagcgtgacgtatcgctcatcgacctcatatgcgccccgcaccggcaacgtccgtccggatgggttgtcgaaggtgaccttggtgtcgtcggtgagcgtggccatcgactgaccggtgggctcgatgttccaagggaccgtggtcagattggagatgcagaccatcacgccgagcaggatgatgaagatgggcaggctgaccatcagccgatggacgctggtccacggcttggatcgaacagtaaggcgatgctcttcttcttgcgacacgtgcgctattgtaatctgaccgcgatatttatgccgagggcctattcggccgaatcagtgaccgggatgctggattggaaccactaccgggccggtggaattgactggcacttggccgtcggcctccatctgggcggcgatatcgttcgctatggtgagcagcgtgtcgacgatctggtcttcgggcacggtcttgatgaccttgcctttgatgaagatctgccctttgccgttgccggaggccacgccgaggtcggcttcgcgtgcctcgcccggaccgttgacgatgcagcccataacagccactcggatcggcgcggtcacgtccttcaggccttcggtgacggcggaggcgagctggatcacgtccacttgggcgcggccgcagctcgggcaggagatgatgtcgaacttgcgggggcgcaatcccatgtattccaagagtttgcaacccaccttgacctcttcgaccggcggcgcagagagggacacgcgaatcgtgtcgccaatgccctcggcgagcagcgcgccgaacgccaggcaggatttgatggtgccctgccaggcggggccagcttcagtgacgccgaggtgcagcggccagtcgcccttggatgcgagcaatcggtacgtttcgaccatggtgatgacgtcatggtgtttgacggagatcttgaaatcgtggaagccgacgtcctcgaacatgtgcgcttccttcaaggcggaggccaccagcgcttccggagtcgggccaccgtatttggcgtacaggtccttgtccagcgagccggcgttcacgccgatacgcagcgagatgcccgcgtcggtggcggccttgcagatgtccgggccgacttcgtcgaacttacggatgttgccggggttcacgcgcacggccgcgcagccggcgtcgatggcctggaacacgtatttggactggaagtggatatctgcgatgaccggaatcggcgatttgcggcagatttccggcagcgcgtcggcatcgtcctgactcggcacggccacgcgcacgatgtcgcagccggcggcggtcagttcggcgatctgctgcagcgtggcgggcacgtcggccgtgagcgtgttggtcatcgactgcacggagatgggcgctcccccgcccaccggcaccggacccaccatgatgcggcgggacttgcggcgcgggtgcaagggcgattcgctggtcaggtcgaccggatcaccggttttgcggaacggcttttcgatgtgattttccgtattcaaggtattcatcattgcttgtttatcaggtcgtcggcgcgtcggcgggcttcaagctcaagttggttcatttcctccacgtccgtgaacagcgggttaccacgaagctcggcgtccatctggtccagcacggctttgaccgtgtccacgatgccgaggtatggcagacgatgctcgaggaaggcatgcacggcctgttcattggccgcattcagcaccgccgtatgcttctcggaggcggccaggcagtggcgggccagttgcacggcggggaacgcctcatcgtccaacggttcaaaggtccaagttgcggctttcgtccagtcgcacgcggcggccacattggtcatgcggtccggcgcggacaggcccagcgcgatgggcagacgcatgtccggcggcgaagcctggcaaatcgtggcgccgtccacgaattcgaccatggaatggacgatggactgcgggtgcacggtcacgtcgatgcgttcaggcggcacgttgaacaagcgggacgcctcgatgacttcgagccccttgttcatcagtgtggaggagttgatggtgacaaccggccccatgttccacgtcggatgatgcagcgcctgctcgggagtgatgttctccatgtcggcacgtttccaaccgcggaacggtccgccggaggcggtgaccacaagcttggcgacttcggcgtgggttccggagcgcagggattgccagatggcggaatgttcggaatcgaccgggttgatctggttctcgcgtacttgggcgctgaacagcagatgaccgcccgcgactacggactccttgttggccaatgccagctgggaaccggccttgagcgccgcgatcgacggttcgaggccgatggagccggtgatgccgttcaatacgacattcgcaccggatccggccatggcgatgaccgaatccggaccgccggtcacgcggacaccttgtgcgccggcctgtgcgagagctgcttgcagtgctggaatcttggtctcatcaaacaccgcgacttcggacacatggaactgtgcggcctgttgcgccagcagctcgatatgtgctccgcccgccgccagaccggtgacggtaaatcgttcagggtgacgcgcgatgacgtcaagtccttgggtgccgatggatccagtggatccgagaatgatgacggtggagttggaggctatgctcactgttccttcttcgtatcgtcattgttcagtgtggggaacgacaggtcggggatatccgaatcgaagttaccgacaagcgggaacagcagcgggaacgaatcgttggaatcgtgcttatcctgtgacggctgagccgcttccgtgtcgtgggaggcggcaacgtattcagatgattccgcagccggacgagaggtcgtgctgtctgcaggctgactatcggatacgcgaaccggaatggagttcgtgttacgatccggcttgctggtgggagcaaaggagaccggcatggcagcggacgcagtctcgtcagcagtgctattcacaggctgcgctgccggggcggaaggtgccggggatgaaaccgaacccggtacctcattcaatttcagcgcattcggtgtatcaaggctgggcatcttgggagcgaaggacggtacatccaccgccggaagttcctgagaaaccgcagccatgtgggcgagagcggccagagaggaatcgttctgcaccatattcacgggctgttccgcgaacaccgacggggtcgatgacggagctgcggattcgcgtgacgactgtgccggagcaaacgagggggcgctgccagcggtcgcaccggaaaccggcgcggacggggcactgacgggaggctcagccgcaacagctgcggtaggagccacggaaggcgtctcggagacgggcttcgccgcagactcgttggacgcatgtaccgggtatgctgcgggagcaaaggaaaccggctgttccgcatcggtgctattgatgcttgtggaagcatcgaacgatgcaggagccggcgcataggcgatcggtgccgccgcggccggcgctgcgggagcaaccggagccggagcagtgaacaagctctgctcggcctgatgcagggcatcgaatgattcgtcatgagcaacggcagacggcgcagaacgttcgtcagttgccgggcgctgcgttccggaagcgaacaatggcgagacgccgttcgcttgaacggtcacgttcgtggcggtctgggcaggagccgcgggctcgccggacacgaaatcggccacacgggcataggattccaagcgactcagcaactgcacgcaggcattcaggaagtaatcgacctgtcgctcgtcatagcctctcttgcccttgcgctgggtgaagatcacattgttgaccgtatccgcattgagatcggccaaagaccgtacatcgtcttcggtcacgccgtcaacgcccaatgcggccgccgccttgtccacaatctggtcgaccagacgatccacctgcttcttatcatacgaaggctgcttgggcgctccggacttgaagcgttcgcgctcgttacgctccgcatggttctggacttcgtgatacagcttctcggtcttcgccttccacgtcacacgcccatgctgtgctatctcccatgtggtctgcttatcgaccacggcacgttccagacgtccaagcgcggcgtcaacctgtgcgatcacatagccgttcttgcgcagatcaaaggacacgttctgaatgtcatgctgggtgagattcatgccctcgctgtcatacaaagcatgggcgcgctccaggaaagcgtccacctgagcggggtcatacccccacttgcgcttgcccgcacgtgcgatgcccgacttgccgtccccttcacgaagttcctgcgccatcggctattcgacctcctgctggatataaacactctgccacaactttacgtgactattgagacgcatctgaccaagaagaccgaaattcacgattctgtagcagtactgccggtttccttctgcacgcatctcactgagatttcagcaccttcgccgaagactgtcagggaatatcgtcacagcccatatccgtggaatgaggggattgcatgaagtgatgaaaaatgaaagtgggcaatgagggactcgaacccccgacatccaccgtgtaaaggtggcgctctaaccaactgagctaattgcccgcaaatgacaacaatagcgtatggccggcactgcgcgacacgtggtgtcgtatacgcgtgccgtagcgctcaatcgcaatgacattcagtcacgcccagcagcactacgcagcacgcgacgccggtcaacacgcttaaagtcaagcgtattgattgaggcttatcagcggcccttgccgaatgcgcgcaggcggatgccgttccagtccgagctgacggtcagcggggtggcggcgttcataccggcggtctgtgcggcggactgcacggtggaggagctggcggcacccgggcggccgggcttgggagtcagtatccacagcgggccgtcattgcccagtaccgcgtaggcgtcaacgatcgtatcggacaattcgtcctcatcatcgccgtcgcgccaccatacgatgacgccgtccacagcggagtcgtagtcctcgtccacgagatcctcgcccgtgagctcttcaatctgggcacgaatggaatcgtccacatcgtcgtcccagagccactcctggacgatatcgccgggctcgaaaccaaattcttcagcgttctgtgatgccgtttgattcacaggggacacattagcaagtcttcgcgaacaaatgcgttaacgcggccgaaaatcgccgcattgtgggcagacccatgcgagtcgtctcaccagaaacaacgactggccgcgcgtgtcatgcctcgcaatgaggcaaatcgtcggcctgccccttgccgatggccaccaacgcctgatacgcctcgtccagcgtggcgaccttgacgtcgcgcagaccatccggcacgcggccggccacatccgaacaattcgacgcgggggccaggaaccatgtggcgccatcgcgcttggcaccaagcatcttcagctctatgccgccgattctgccgactttgccgtccttgtctatggtgccggtgccggcgatggtcttgccgccgctctcgttggcgggggtgagtttgtcgatgagaccgagcgtgtacatcatgcctgcggacggcccgccgatgctgtccacgtgcatcgtcaccttggcgtgttgcaatgcactggcgtcaatgtccagttcgtccgcatgggctttggcatacgccagaccgacggcactggccgaatcctgggaaccggccatgtcttgttcgactttcttctgatactggtccgcactctggcccaccggtaccgtggcctcacgcggcatgacctccacctgcggattggaccaaccccagacggcctgcgcgttgatgatcgggtacccgggcacgccggacgcgttcaccgtggtcagcagcagcttgccggaatccttatacgtcgtcacgccggtaccagtgatgtcgataaccgcaccatcctcaactttgcccagcacatcctgggtgggtccgggcatctcgatgacgtacgggctgggcagcagcagaatcaccacaccaagcaacacggcgaatgcaccgacgaaatggcgtttcgaacgagcggccgcataggcccgagcacggctgattccacgagataggcgcgaatcatgcttcacttcgaacgatggcatgtgctcatctcccgcttccgaatccgcagtcgggctctcctgctcctggacgaggtctggttcctgattcctgtggcgtgcaaacataccctacagtgtaagcggagggccgaaatcggccgaaaacgaacataaaccgaaaataatgctcggccacaagcgaacaggcccgggcagaccctacacttggggtaacacaccgcggcaaagaaggatacgcatggacgacaacgcgattcacgagtggctgatcaaatgcttcggccccattcagggtgagatggcctggcagcagatcagccagttgcctgaggagatccgtgaacagctgatgagtcaggaccccagccgactgcccaatccatctgaagtccagcagatgatggccgcgttcagcgccggcggactcaacacgatgggtgatatgcagcgcactgtcgaggaagggccgatcaacgtcaagctcgccaagtcgattgccttgcagcaggccaacgcctccggttctgcatccagcgtgtccgccgtggatggcgaggcggctcgccgcgcgatgagtgaggcgaacctgtggctggataccgcctgcgagttcaatcccgcgcccggcgatccggatgtgctgccccgcgccggctgggtggagggcaccatcgaccagtgggcgaagttcgcagctcctgtggccgagtcgatgaacgacgctttggcttcggtgatttcggagcgtcttggcggcgcgttcggcgatggcgagattgccggcatgttcgccggaccggtgccgattccgattcccgacggtatgaaagacccagcccaactgatgaagctgctgggcaacacgtcctttgccatgcagttggggcatgcggccggcaatctgagccatgaggtgcatggcagcttcgatcagggcatcgcgttgctgaagaacccggctggtggactgattgcccagaacgccaccgaatacgcgaagatgctgaacggtgaggcttctgcggccgaggccgacacggccggcacttcaaccgactcggtcaatccgttctccacatccaccgacgcttctgccaatcccattggcttcacttcggccggcaacagcgatactccggcaactgacggtaccgcccaagtctccggctctgatgcttccgccgatgccgccgacgccgccgcgttcgaggctgcgctctccggattcgagaccaccgagaaaatccccgaatctgaagtgctttccttcctggccctgcaggaaatggctcacgcccgcctgtacgcctcggtaccgtggctgatgccgcgtttcgaggcgctcatcggcaagtacgcacgcggcatctccatcgatctggatgcgatggaggaacagctgcgtgacgccacgtcgatggatccggagtcgatttccggcgcggtgaatctcaccaaggtcggcatccccgacactcccgaacagcgcgaggcgctggcttcgctggaatcgctgctggcgatggtcgagggctgggtggattgcgtggtgtggcgcgccggtatggcccatctgcctcatatcgaacagttgcgtgagatgatgcgccgcgagcgcgcgatgggtggccccgccgagcgtacgttcgaaagtctgctcggtttgcagctgcgtcccaagcgcatgcgcgaggccaccgggatatgggagatgatcaccgccgccgaaggccctgaaggccgtgacgccaagtggacgcatcccgatctgctgccttcgctgcctggcgacaagcccgcagatggcgcgtctccgtcatccgacgccccttcaggttcttcttccgatgccaacggttccgcttctcaccctgccgcagatggcaagaccggcgatatcgattgggatgccgaactgtccaagctgctcggcgaagatggcgaagacggtgaaaacggcaactcggaggatacgcaggcatagtcaaccggccttcagccaattcccgctcctgaacgttcaggagcattcagtatgcattacagacgcccgtcacaaaaatcgtgatgggcgtctgcgctgcgctccataaccatccttggtccgtgcatacgacaaatgcagcgaatcctcagctcgggtgatgcccacatacataagccggcgttcctcttccagcgcatcccccgtttccggcgaaccatacggcaagagcccttccgaacagccgatcagaaacacgtgcttgaattccagacccttggatgcgtggatcgtggaaatcgtaaccccgagatcgtcgtttgcggcaagtccggtggcgtccaaacccatcgcctccaatagtgcgcgtttggacgcggcatcgtcggcgagcgcggatgattgccatcccgaatccttgcggacgcgatatttcagtctcgcagcgcgcaaggcggcaccgaataccggctgttgggcgttgatgcgggtgaggatcgcgcaatcggacggcttggccccgttggcaaccaaccgggctatgcgtgccgccacgccctgtgcctcttccatatcgctctcataagcggttcgggtaacgcgcgggccggattcacgggcggaaaccagtttcaggtaatcctcacggttcggcgcggccgcaagcacccggttggcgaggttcacgacttccggcgtcgaacgatagtcggtgttgagattgacatcggcggcgagcggcccgaattcatcggcgaaacgcagcagatcccagctggaggcaccggcaaacgagtagatggtctgggccggatcgcccacgacgcatacgttgcggttcattgcgctcttgccgtcaggtcctcccccgcccagccacaggatcagcagcctgtgttgcaggggcgagacgtcctgatactcgtcgacggtgagccagccgatggtggaacgaatttgggcggcggcttcgggaaaatcatccatgatatggcatacgagcagcagaatatcgtcaaaatcgatttcgccacgcgaggtcttttcctgctcgtaggcgctgtagacgtcggcgaaccgagcggtgtcgagtccggcgggcggctgcctatgggcgatggcacatgcccgcgcataatcttccaccgccaccaacgagattttggcccaattgatttcggcgagcacatcgcgaacggtcagcggatcggcatcggtacgtgcggtggcgcggatgatcgcgcgggagacgacgtcacgctgatcttcgatcacatgcggaaatggagcctcgcatatgtctgcccagacgctgttgagctgatgcaatgccgctgagtggaaggtcgcggccgtgactccggcagttcccgcacccaaaccggaacgtccagtacctccccctacgccgagctggcccaatcgtgcgcgcatttccgccgccgcttttaccgaaaaggtgacggcaagcacccgctccggcttccatgccccggtggcgcaggcataggcgattcgccgcgtgaccgtgcgtgttttaccggcacctgcgccggcgataatgcgcaccggcccttgcaacgtagtcgcggcggtacgctgccgctcatcgagcccctcaagaatcccctgcgcctgttccatgcgtccattgtggcacgattcgcgctcacggcacgactcatgcctatggctgaatcgggctcacgacaaaacatcgccagaatcatgcgttttgcgtgtcattctgcggtgcgaatcgccacggatgtattagtgtggaagggtgatgaaacgtagcgattatatgttggcggcactcgcctcagccgtcctgccgaatctgggggtggccggcgtacgcgagaacgtgcaggccagcgcaaccgacgaggccaaaggcatcgatcagaccgtgatccaagatgcctcaggcaagttgtacgacgtatacgccactgacaccaaggaagggcgtacgcgtctgattcgccgtgtgaaagcggcgcagacactggcagccgcgcgcgagcctggtggcctcggcttcgatatggaccgtgtggtcgcgttcgccccgggagacgtttcccgacccggccagacggccaccgcacaggccgtggggcagcagacccaggcggagtccacaccgctgaccccgcgcaagcccggtcccacaggcgagacgaccgtgatgattgccgtccaccgtgatggccaggcgcggcctctcgacctgttgacattggatgactgcgcggccgtcggcaccgccatcggagccattcatcgcctgccttcgacttttctggccaatgccaaatatccggtagttaccaccggtcagattcgttcgcagctgaccgcctggattcgccgcttacgctccgccggccatgttccccaagaaatcaccgacagctgggcgcgcatcatggacaccgagggattgtggtcgttctccacctgcacggttcacggcggattttccgacggcgacttcctgttctccggttccaccatcaccacggtgaccaactggcaggatatgcaggtcaacgatccggcacgagaccttgcctggattttcggcaagctcgacgaatcccatcgcaacgccgtgctttccgcatacggccgcatgatgggctctcgacttgacgatctcatcatgctcagggccaacctgtggctgcagatggaacaggtgggcgaattcattcaggcgttgaaccgtgcggacaacgatcacatcatgcagttcaaggcacaggtcgaacgactcgcacaccagttgggcgtgatcaagcacactccggcaccggccccagccgcagggtcggccgccgcctcgtcaacgaagcccggtttgccttccacaatcaccgtcggcacattgttgcaggacgaccgtcatcaggcacccgcacaaccgcagcagtccgacaccggtaccgcggcggccgaggtctcggacgacacgcccgatcccgatcgcaccggttccgctgacatcgtggccgctggcgacgtggatcttaccccggaagtcgaacccgatgctgaccggaccgccaatcacccgcaaacgaatgtctccggcatcgcaaccggtacgggatcgaccaaaccgcagccctcacatggcgcttcccattcttcggtgacgatcacgctgaaggagctcctcagtatgaacgggcatagcggcacgacgtcaaccgacgcttcccctgcgtctcaatccgccgccccgaccgacgatgcggtgaatgacgatactccggacagtctcgttcagtacggagcctcgagtgcccaaaccacggtgattccgctgttggagcgggaagaacgcgctctgcgcgatgcccgtgccgggttggacgggtatgacagcgagggcaatccgctggccgaatcgtccacatcatccaaataatgtcgtgtgcggtgttccgcgccacgccgagcgcgtaacaccgcacatgacgacgcagacacgcggcacaatagagtacagaacctcggccggcgacggccacttaccatgatgttcgtcacaaagacggcagaacaaggagccttatatggatatcgaactgggcattcagaacgtggcacgaccggtgaacttcagcaccgacgaatcagccgacaatgtgagccaggccatcgcgcaggccgtggccgacaacgcgacgatcgatctgaccgatgacaagggccgtcgcatcatcgtgcccgccaaggcactcggttacgcgatcatcggctccgaaaccaagcacgccgtcggcttcggcacgctgtgaccatgaatcgcgcataagcggccttgggcattatctcaaggccgcttttgtattgctgaatcaccgatatagcggaagcacgccgcgatgaacgatctcttcgacagtggcctcgtcggtgaggttctcccccagtttgttcggtttgcctttgccatgccagtcagacccaccggtgaccagcagctggtgccggcggcagatggtgagcagccgttctcgttgctccggtgaattgccacggtgccatacctccagcccgtccagtccttcgctgatcaatgcctcgatctggtcatcggacaacagtctgcggttacggctcacatcaccggcatgggcgatcagaatcacaccgcccgctcccttgacggcggccaccacttcatgagaggtcggcgaaggcgtgggaatatagtatttggatgaggcgctgaccgcatccgcaaacgcttccgaacgagtccgatatacgccggcactcaccaaagcatcagcgatgtgaggccggccaatggtggttttgctaccctccttgacttgggcgagcacggattgccaggtaatcggataatcacgagacaacaattcgaccatgcgctgcgtgcgttgcaaccgtgcggctcgagtattggcgaacaagtccgtgatgtgctgattcgtgggatcatactggtagccgagcatgtgcacggagacgttctcatccgtggcggtgatctcggtgccgcggagcaacggcaaaccgaccctatgagccgcggcttcggcctccggccagccggcggtggtgtcatgatcggaaatggccacgcccttgagtcccaatgccttggattgttcggccaacgtggccggcgtttccgtgccatccgagaaggcggtatggcagtggatgtcccacccgacggcgggcggttccaaaggcatcacatatccagtcataccttccatcgtaacctcatttcagcattcccacgcaaggcgcagacaggtcgtcaccttctgccaacggccgaaaccagacattcggcacccagctgacaaccgcagaggctaatctggagcgcagcgctatcgaaagggacatgatgactcgtaacaccgcaaccgacacatcatccagcaccacgaacaccacgccgcttggcttggcggaggcacgaccgttgattggatggcgccacagtgccacttggacatatctcatcatgctgattgcctcggcagtggcgttgggggcctcgctcattctgtccgctgagactttgcaattggctcggcatccggagtccgcactcggctgcgatctgaactcggtggtgtcctgttcggcggtggcccagtcctggcaagcggaaatcgcgaagttcggcgggctgagctatccgaacgcgttcttcggcatcgccgccgaatcggtgttcattaccatcgcggtgatcggtttggcgcgtgtgaaggtgccgcgttggttcgcgacctgcacgtggctgggcggactggccgctttggcttactcgtactggctgagcacgcagtcgctgttcgtgattcacgcgctgtgcccgtggtgcctgaccctgatgttctccaccaccatccagttcatggcgttgagccatgcgaccgtggccgtgcagggattgccgtcgcgtaaggctgtggcggctgatgatagcgacggtgaggctgaggtcgcggcggtgccggccggactcaataagtattaccgcctcaacatcgacctcatggtcgacatactgtggatcgtggcgatcgtggtactcatcatcgtcaccgaaggcgcggccctgttcgctgcctgattcctttacaacaaatcgatatcggcgaccagcgtggctgctccggtcagctttacgtcgctgtcggtgacgtccacgcgcagggtgccgccacgtacggtgatgtcccagtggctgatgccggtcttggcccgcagcacaatgcctgtggcgcacaggccggtgccgcaggacagggtttcgccgcagccacgttcgttgacgcgcatcgtggcttcacccacgccggtgttctggtcgatgtcgtcgacccgcacgaattccacgttctggtcggattcgatgaccggagccaccactggtttggtgaccaaatccagtgattcaaccactggcagggacgcgaaggcatcctcgatcaccgcgaccacatgcgggttgcccatatccacgaacgtaccgcgcgccgagccctcagtgccggggatggtgacctcgtaggcgtcggtttcgccgatcttccactcccccatttcgacctggaacacgttggctccgtacggcctcatattgccgcgtggcgtcagaatcttgacgccggcacgggtgccgaggcggaacggctcggtggagtcggccaccccctcacgctgagcgaacaaggtgatggcgcgtgtaccgttgccgcacatctccgccaacgatccatccgcattgcgatagtccatgaaccatttcgcgcccccggccagtacgtccgaaagctgatcatcgcttaaatcagacacgaaatcaggccgtgtcaggcgaatcaggccgtcaccgccaatgccgaagtgacggtcgcacaggaatcggacctcatcggcggtaggctcgaatttgccggacttgtcgaggtataccacgaaatcattgccggttgcgtgtgtcttggttactcgttgcggaagactcatggctttcagagtactctagggagcgaaacaacaccgcaaaacaatcggctttgtgatcggtcgcggcaacatacggttgcaggcatggctatagggaggattcaggcatgagctcttcggctccaatcggcgtattcgattcgggtcttggcggtatttccgtggctcgccaaatcgccaaggatatgccggccgagcatgtgctgtattttggtgattcggccaacgcaccgtacggcatcaagacgcctgaacaagtgagggccctgagtttcgatattgtcgaacggttcgtgcgtcaaggcgtcaaggccgtggtcatcgcatgcaacaccgccacttccgccgcggtgaacgatttgcgcgaacactacgatattccgatcatcggcatggagccggccctgaaagtggcgtgcgaccgtggtgacgtgccttccgacccgcatcatattccccagagggtgattgtggcggccactcccctgaccttgcgtgagcggaagttcgccaaactgatggatcgattcgattccaacaacacgattttcaaggagccttgccccgacttggtggagatcgtggaatccgggcggctcggcgaccatgacctggtgatgcgcacgctgcacggctacttcgaccagtacgacatggagcatatcgactcggtggtgctgggctgcacgcatttcgtgttctaccgcgactacttccgcgagctgctgcccgaacgggctgctgtcatcgacggcaatgagggcaccgtgcgccatctgggcgttgtgctggagtccctgggcaaactggcacccgaagacgcgaccggcggcgtggaactcgccaattccgatctgtccgaacgtgttacacggctttcacgcgacctgctgaatgcgtgatcggatgcatgatgatgaataggaggctgatatggcactgaagacggcaatgattgatgtgggcggcgggttccgcgcgattttcggctgcggcgttatggaccgcatgctggaggacggcatcgacgtggacatgtgctacggcgtttccgccggcgcggccaacatgacctcgttcatcgcccgccagcacggccgcaaccacaccttctacaccaagtacgccttccgcaaggagtacgcgagtgcggaaagcttcttcaagaaccacaactttgccaacctcgactacatctacggcacgctgagcaatcacgatggcgagaatccgttggatttcgcggcgttcgaggccaatgagaccgggttcaccgtggtggcctgcaatgccgaggacggctcgaccaagtacttcgacaaatcgcgcgtgcgttttgatgatttcgacatcatcaaggcttcgtccgccgtgccggtggcctgcgagccgtatgtggtggatggtgtgccgtatttcgatggcggcatcgccgatccggtgccggtgcagaaggcgctggaggacggctacgatcgcgtgattctgattctgtcccgcttgcgtgacgaagtgcgcaagcagcagaaggatctggctccggcccgcatcctcgaacgctcccaccccgccgcggccgagaagctgcgcatgcgctacaagacctacaacgacgaactcgaactcgccaagcattacgaggcggaaggcaaagtgctgattctcgcacccgaagacctgtatggtctcaacaccctgaagaagaacttcgagggcctggaaatgatgtatcgcaagggatacgcggcggccgaggccattccggcattccttcaggcatagcgatagtgaagtccctcgcttggaggggcttcactatcgatggatggggattcgcaaacggggtgattacttcgtctcggaagcggtgagcatggccttggtgacctgctcgtagagatcctgataaccgccgggcgtggaggcgggcagcaccacggtcttggtgttgttcgattcggacagcgagcgcatcacgtcgaggtactggttgaacagcaccacgttgttcacgtcgttgatgttcatgcccacagcctgcagactcttgatctggtcgacgataccgttggcgatctcgcggcggtaattggcctggccctcaccctgcaagcgagtcttctccgcatcggcggcggcttgggtctcgatctggatacgctgggcctcggcacgctgacgggtggcttccttttcacgctgggcggcgttgatggagtccatcgcgttcttgacctgtgggctcgggtcgatggcggtgatcagcgtcttgaccacggtgaagccgaaacggctcatttcggcgcccacggtcttctgcacgtcgaacgccacatcgtccttgcgggcaaaggcatcgtccaaagacagtgcagggatagcggaacgcagcgcgtcctccatgtaggagcgcagctgaccggccgggtcacgcagctcgtagtaggcggtggccacatcgttcgggttcacgcggaactgggtggaggccaccacggtgacgaacacgttgtcaagagtcttggtttccagctgcacgttaagctggttgacacgcatgttggttttcatggcgatgcggtccacgaacgggatgcggatatggatgccggcgaactggaccttaaggaacttgccgaatcgctcaatgatgtaggcctgctgctgcggcacgacaaataatgcggcagacagcagaacaatgagtagcacgatgataatcagcggaccagcaaagaatacggccatgatgttttcccttcacccacgtcgaaaccgccctcggcctcgactcgtgatttccatcgtatcagcgttcaaaacaaagcggtagacatcgtacgcatatgtgtacaactgttcactatgtgtgcatgctggcttcttataaaaaagtgcggcatccaatcagtatgctgcggccatgcctgagccgacagccacggcgccgataccgccctccagcgcggcaagccgcttttccagtgcatcgacagtgggattggccacacgggagtactcgaagccgtcgatgtcaccgcccgcgagcgcatcgccgcgcgccgcgtcacccaggtcgaatgcggccgaggcatagattggcggcacagcggcacggccgttatccagcggctcgtagccggcgtggatggcttgcgttcggaaatcaacgcccattaatccttcttcctcatgccgctctattgtggcgggctcgactctattcccgaacttagcaagtcatggtacgcgacaccggcacatcggtatcgcaattgtcaatgcgcgcttataagcaatggctatagaatatccgccgaatgccggaacacaccaagctgcccagccctctttcagcacctcggccgcaatattacgctgcctcaaataattcaaagccgcgtcaatccgtaccggttcaccatcgaaaatggccacgatgccccctatcggggtatccgcgacgatgtcgatatctccaaagattatgttgacatcgatgccgaaccctttagtaatttgcgacaccaacgcttcagaaacttccttggacacatattgcatccggaccaatcgttggccttcagacaatctcatcaaaggggagtcatggttctcttttcatatctggcgataacgcatatcaaatcagcaatcagcgcaaagacgctcggtcactccatccggataacaactttgccgtttcgcctaaggtgtcgatgacatggtcaaccggtgaggcagaaagagcttcagcatagttctcgatgcgatagtcgaaataacgatcggcgcccagcgcgctgctctccgaaagcaccggaacgaacgccgtcagcattcgtaacgccttgggagcgctcaaacgcgcagggctcatcacagtggcacgcggaaccggcggtgccgaacttgcccacaccccccaaggaaatcactctgctcgatatctatcaggcagtggaatccacaaacctcgatgatgtgatcggcatccacgagagcgggaatcacacatgccccgtggctcggaatatccacgacgttctcaaagatgcgtatgctccagtggccaaagccatgtcggattccatgagggaagttacgcttgccaatatgcttgccgactaccgaaatcgcattggggtcaaagcccggcaattggaacagtagtgggcaccgaagcgtaagcccccctactctctgatccacataaacaaataaggcgcgcgccatcaagaccgatcgatgacgcacgccttatgcagctcagaccacggattcctagtcagccagcagccccagctcctgcagcttgttcttgatatccactgcagagggttccacttggaacgagccgtcatcgtaccgcaccaccggaatgtgcatctggccgctgatcgccacggcacggtcggcggcaccttcctcttcctcgatgttgtgccaagtgtatgccgcgcccagtttgtcgagagtgttctttgcctggcggcagtcgccgcaccatgtggcaccgtagacgtcgatggtcatatcgggtcctttctttgttccgccgcgcttgacttttacgcggtgcactatcaaaccgtattcatcgtaacggggatgctgcgatatcgcggttggcataatgcgggcggtccgcttaaccacccccagtcggctacgccgacagccctctgccagcggaggcggaaccagagcataaaaaagcggcgccggtgtggcacaaccgacgccgctccccaggagtagaaaaataggcagaaaagtattagatcaggcaaacacccccgaagtcagctgttggaacacgtcgaagtcggcatgccgatcgatgtaacgggcgtaagcgatatcgaacgcctggccgagatcttcgatcagatcgttggcgtcctcgatgccaacggcgagacgcaccaattcatcggtgatgccgatcttcagacgctcctcgcgaggcagttcgaaatgcgtcatacgacacggcagctcggcaagagactccaccgcacccaacgacacagcaagacggaacaggtgcaggttgttgagcacgtcagccggatcaacgccaggcacgacctcgaagctcaacacgccaccggcccccttgagacctttggcagccagacgctggtcgcctgcgccgggcagacccgggtaatgcaccgccttaaccagcggatgcaccagcaggtagcgggcgatggcattggcattctcctgctgacgatccatgcgaagggccagcgtctgaatgccgcggcgcaccgcgtcgcactcagcaggagccaacacaccacccaaacggttctgcgcgaagtacacgcggctcgccagatcctcaccggaaacgaccaccagaccggcgttcacatcagaatgaccggccagatacttggtggcggagtgaatcaccacatcggcacccaaagcaagcggcttctgcagatacggggtcacgaacgtgttatccacaatcgaaagcgccccgaaacggtgggccaccgtggagatggcgcgcacgtcgttcaccttgagtagaggattggtcagggtttcaaagtagacggcttgggcaggcacgatgccgttcgcgcggtcgcccttgacggcggcctccaatgctgcgatgtcctgagtgtcgacggcctcaacgatgattccccagcgagtgaagaactcattgagctgggaatacgatccgccataaatattgtcaccgaccacgatgcggtcgccgggcttgaaaatgctcagcaccgcgtggatcgccgcgagaccggaggcgaacgcaaaaccacgcgttccctgctcgagctgggcgatctgctgttccaggaagtcacgtgtgggattgccgcttcgtgcgtagtcatagcggggcatcgcgtcaaccttctcgaaggcatatgtcgttgagttgtagatcggcgggttcacggctccggtgttgttgtctccaaccggcagtccgtggacgagctgagtgttgaacctggtcattgcgcacccccttaaagtgttgcgtcatctgcgcgaagccgttccccgcgcggcacgattacgaccttaacgcaaaacgccggcccgaaggccggcgttgctatatgtgttggttatggacgggtataatcagacctctccgtcctgcaagaatggacggcctgacgaccggcccaacacacctcgccgctgccgcggctcggcgtcgcctacggacagtccaccggactgtccgtcagacggctccgccttctaccacgatgtcatcggggttgacttcgttgccgtagaccggctccagagtctcctggtaatccttgtggaagaagttgtctttgccgagcttgacgatctcgtcgttcacgaagttcagcagttcggtgttgcccttctgcacggcgggcgcgatggtgtcgtcgtcaccaaggtgggtgatgccgaccttgaagcccttgttggacttggcccaggcgagcacctcggtgttgtcggtggagaaggcgtcaccacggccgtccagcagcgcgttgtaggcatcggcgtactggtcgtacttctgcagcttgacgttcggcgcgttcttctcgaaccaggtttcggcggtggtgcccttagcgatgatcagggtcttgccgtcgagctgactgacatcggtgatctgggcgctctccggggagaccacaccaagcgccaccttcatgtacggcttggcgaagtcgaccttctccttgcgctcatcggtgacggtgaaattggcgagcaccagatcgaccttgttggaggtgagcacgtccacacgggcagccgggtcaaccgacgtgtattccggctccacacccagatccttggccagctgttcggcgaagtagacgtcatagccctggtacttgccgtccttgtccacgtagccgaatggcgccttgtcggagaagacggcaatcttgatcttgccgctcttcttgatctcgtcgaggctgcgggccttggcattggcgctggagctggtgcccgtgtcagaggacttcgcttcgctcggggtgcctgccgacggaccgcatgcggccatggacgccgccattaccaatgccgcgcctgcggcaatcagtgctttgaatgatttcccaaccttgatactcattgggttctccttctcttgttgttattgatatttcttctcaaatacgtcgatatggcacaatcgaatcactcgaattcgaaggtgtgcaggaactgctgcgcacgttcggtttgcgggtgttcgaagaacgcctgcgcatcatacgattcctcgacgatgcgcccgccgtccagcaagatgatgtggtcggcgatggctcgcgcgaactgcatttcgtgggtgacgataagcatcgtctgcccggacttggccagttcgagcaccacgtcgagcacttcacgcaccatttcggggtcgagagccgccgtaatctcatcgagcagcagtacttccgggtgcagaatcagcgcacgacaaatggccacacgctggcgctgaccgccggacaattcgtgcggccaagagtccttgcgatcggcaagtcccacgcggccaagcaaccggatcgcttcagcctccacctcggacttatcgcgtttctgcacgagcaccggcgccatggtgatgttgccgagcaccgttttgttcgggaacaaatcgtagctttggaacaccatgccgatacgcgtgcgcagttcactggaccggtcggatcgtccggctcgttccgtgccaggcttgccggcatcgatcacctgatcgttgatggaaatcgtgccgccctgaatcggttccagaccggcgatggtgcgcagcagcgtcgacttgcccgagccggaaggacccagcaccacgagcaccgaaccatgctccaccttgaaggagatgtcatccagcaccggcttgtcggcattcgcatactgtttgaccagatgattcacctcgaaacccttgcaggtcgtttcgggttcagtcattcgaccacctcttttccagtcggcgggccacaatggacagcggccagcacacgatgaagtacataaagaaaatcacgccataaatccacaaggttccagtcgggaactggaatcggttcgcgtcgataatctgctggccgaccttgatgacctcgaccacaccgagcagcacggccaatgatgtcgttttgacgatacgtgtcgccaagtttacggatgccggcagcatacggcgaacagcctgcggcagaatcacccgggagaaggtctgccacgggctcaaccccagtacgtagctcgattcgtactgcactttgggaatcgactgcaatgcgccacgcaccagatcgcccagctcggcgcctccccacaggatgaacaccagcacacaggcaccggtggcatcgagattccaatcgaaccatcgagcaaaaccgtagtaggcaaggaacagcaacgccagctgaggcataatgcggatgaagtcgaggtagatgcgcatcgcagcccggatcacgggattcttcagcgtcatcaaccagcccaccaacaggccgaccgggatggacgcgcctacggatacgccggctatccacacggtgacccacaggccttgcaacagacgtgggaatacgcccggctggagcagtatttcagcgccgctcataatcgaacctccgctccaaccatgtgccgaagatggaaatcggcagcagaatcaccagataggccacgaccagcatgaacaacgactcataggtgctgtaatacatgccgatcagatccttggccatgtacatcacgtcggcgagcgcaatggcggagacgacgctcgattccttaaacaggaagatcacattggccactacgccgggaatggcggtggacactgcttgcggcagaatgactcgggtgatggtttgcgtggaagtcagtcccagcacgtacgcggtttcgcgctgcacgttgggcaccgcttccaatccgccgcgcattgcctcggccatgtaggaaccgcccaagaatccaaggccgactatcgcgcaggtttcggcggaccatactacgccgagtttgggcaggccgaagtacagaaagtacagctgtaccagcaatggcgtattgcggctgagttcgatgtagattctcacgatttgccgggcgaccgggatacgcgcgatttccacgccagcgcagaccagacccaccgcgatggcaagcaatatgccaaacacggatatgaataaggtcatcaatgtgccgttgacgaagaaaggcgcgtaacgctgcacgaacgaccaatcgaatgtcattgggcgcgctccttcctttgcttctcgtttcttctcctgcgcataaacggtcttagccacccatgtacgatttcgggggccgaacatacctgtcccccctgccgtgtcatcgtagagtatcagaacacgtggcacggccgctgcgctatacgcattacttatgggacgttactcgatgggcgaacatcagggcattattgtcgcccaaacggtggatacactgaggctatgaagatcaccaaagctctgacccgtttgaccggtcccgaaaccgctccggtgttcgtgctgttgcacggctggggttccaatgaatacgatttgcccgatctgctgaactattgcggtgccggttcggctgattatgccagtttgcaggcacccatcgcctatggcatgggatatacatggttcggtgcgtgggcgcatgaaggtgtgccggagggcgaatcattagacaagcaggcgactgaagccgcccaagccattgatgcatgggttgcggagcatattcccgccactcggccggtggttgccatgggattctcgcagggcggcctcttggccgcgcatctgctgcgtttcaatccgaagcgatatgccgcagccgtctcctgctctggatggctggcaccggggtccgttgcgggcgatgccgaattggcttcgttgaagccgccggtgttctatgggcatggtgctgcagacgacatcttcccgaaagccgatgtgacggcgatgggtgagttctggcacgagcacggcacgttgaccgaacaagtgtatccgggcatggcccattccattaatatgccggaaatgcgcgatattcaacggttcttggagaccaacggattcattcggccgcagatttggtagtcaccacctcacatggcgtagtcgacgtgggcgaattcggggactttataccatttgacggggtagccggcaccgtgggcgcagaagaccgagtcgggggtgttgtccagatctgcttcgggatcgtaagcggcggctgcgatgacctgttcggcgtcatggcatggcttgtagccgccgaaagtggcggagaaacggccatggccgtgcgtgtactggttcacatccatcgcatagtcgcgcatctcggacaccggcgcctcgccttcgatcacggcgtattcgccatcggtgaccggggattcgaaggtgccggccatgcgctggatgtcgctcatggcacggccgatcatgtctgctggcacttcgagccggaaccgataccacggttccagcagtcggcagttgccctcccctgcggtgtccggacggctctcgaccggcgtctcgggccggccactgactccagctctggcttccataagcccctgacgaatcgcacgataggtggcttggcggaagtcgccgccttcggtatgcttcagatgcgcgcggccagccaccaaagtcatcttgatatcggtgagcggcgcgccaacgagcacaccgagatgctcacgctcggtcagatgggtcagaatcagccgttgccaattgcggtccaaatcgttttcggacagggccgaggccacagtgactccgctgcccggctcccctggttccagcaggatatgtgcttcggcataatgacggagcggctcgaaatgacctgcgccttcgatcggcgcagtgacggtctcacggtacaggatggagccggggccaaacgacacatccagaccgaaccggtcgtgcagggtctgctggatgatctccagctggaccgcgcccatcaattgcacatgaatctcggccaaccgctccacccagaccacatgcaacaacgggtcttcgtcttccagctcacgcaatgcggtgatgaccttatgcaaggtcagatcatcgaactggggacgggccggcgagctattgtccgccgcggtctggccggcggtgtcgttctcctcattgcggccggttcccgacttggcggcatcatgctcggcatcgtcctgattcacgttgttatggccggcgtcaccgcgtttggccgctcccgaggtgccggccgtatcggattccgctccggcgggcaacaccgtgtaggtcaacacgggttgcagcgacggtgattcggcgtccggttccgctcccagcccttcgccggggaaggtccgcgtcagtccggtcaccgcacacaccgatccggcaggcacctcggtgaccgtctcgaatttggcgccattgtagacgcgcacctgatcgactttctcggaccataccgtgccatcatccccctgtaccggcgacggtgctgatgacgccgcagcgcacgaggatgaagagacgatctccttggctttgagcgcaccgccggtgacgcgcagccacgtcatacggttgtgctggccgtcgtgggcgattttgaacacgcgtgcggcgaaggcggccggccattcacgttcgcgggtgaacgtctccagcccgtccaggaattcctcgactccttcgagtttcaatgccgagccgaaatatacggggaacagctcgcgcacggcgatcatcgatcgcaatctgtccacggacagcgcgccatgttccagatagtcgttcatcgcctcctcgtccagggtggcgatatcctcggcaagcgcgtccaacggtaccgcgctgccctcagtggactgctccattgccggcagcggatatatcgcatcgctcaggcgtttgcgcaactgtgccagaatggcctcgcagtcgaatccggcggcgtcgcacttgttgacgaagatgaacgtcggcacaccgtatctggccagcagacgccacagtgtctcggtatggccttgcacgccatccgtgccggagaccacaagaatcgcgtaatcaagcacacgcagcacccgttcggtttcggctgcgaagtccacgtgccccggcgtatccagcagggtcagtcgcaggtcgccgtgttcaaccaacgcctggtgcgcgaaaatcgtgatgcctcgcgccttctccaaggaattggtgtccagaaacgcatcgccgtgatctactcgccccaatttgcggatctcaccggtacggtagagcagcgcctcggacagcgtggtcttgcccgcgtccacatgcgccacgatgcctgccactatctgtttcatcagctgtgctcccttcccgatgcgccgcgcaattgccggccgcctaaccaatatatccgagaaaaaccgggagggaataattttaccgtcagaccgggatgccggtacaataagtcaccgaacaccgactgatatgaggagcctccgtgaccacttccggcattaccgttttcggccaaccatcccagcccaatcatggtgccggcgggcgaatcgccatggacgatgccgtcttccccaccgattatgtggcgctggatttggagaccaccggcttttacccgaacagttgcgccatcacggaaatcggtgccgtgcgcgtgcgggaggggcatatcgtcgatcaattccagcagctggtgaatcccttgcggccgattccgcgtcagatcaccacgctgaccggcatcaccgatgcgatggtggccgacctcgatccgattgacgaggtgcttccccgattcatcgcatggctcgctaccccggctgccggtcccgccgtcgagccgattgtcggccataacgtcagcttcgatctgcgattcctggattacaacacccggcatatcgccggctgcggctttgcctgcgcggattatgacacgatgcagatcagccgcgccctgttccccgcgcagcggcatcaccgtctggccgacctgatcgtacgcttcggcatcgcggacaatgaggagcaccgcgcattaagcgatgccatccaaacccagcagtgcttcgaatggatgcggcattatgtcaccgagcatcacgaatccgaagcgatccgctggaagcaggcgccggccaaaaacagcgccgaaatcctccaccagcagttggtggtaaagcggtagtttacagcccgtattccttggcgatgacggaccagaggtcggcagcggcctgatcaacggtttcgttgacgatggtgacgtcgaattcgctttcggcggcgagctccaccttggcggtctccaagcgacgggcctgctgttcggcggtttcggtgccgcggccgatcaggcggcgctcgagctcttcgaagcttggcggcgcgatgaacacgtacaccacttcgaggtcgagctcggcggcgcgctgcttgacgcggcgggcaccctgcaggtcgatttccagaatcgtgggcacaccggcggccagatgttcctccacaggcttgagcaatgtaccgtagtgggccatgccgtgcaccacggcggtttccaggaactcaccggccgcttcgcgggccaggaactcgtcttcagtaaggaaccaatagttgacgccatcaacctcgcccgggcgcggagcgcgtgtggtggcggagacggacacccacacttcggggtggtcggcgcgcagcttggcttccacggtgcccttacctactgcggtggggccagtcaggacgattagacggccagcatgggtgttttcagtcatgggttcctccggagatgatgtggtgtgcagcgattatgaatccaatgtggtaacggctcaccggcgagatgaccggtaactgctacagccccgacgaacagggaagaatatgaatcgtgatgcgacgtacgcgatgagatagacacgtacgcatgccgcgacatctgatcccgttctgattactggttttccgagccttcgacagtggcttccatcagcgcctgacgtacgtcaagcgcaatcgactcggtggcttggctcagtgcggcgatatccggcccatgcgaggcgataaagcgggacacggtgaccagcacgttgccgcgcgtaccgcggaacacggttttcagatccttggcctcggcaccctgccaaccgtaaccgggggaaagaatcggaccggtgaacttggaggggtccacgccggaatcctgcatccattggccgatggtggcaccgataatcagaccaaccgagcccatgccttcgatatccacgttatgcttctgcgcggtggaggcgatgccgtaggccacggtacgtcccttgtaatcgccgctctggcgcaacgcggtctgcagactcatgccttccgggttggaggtcagggaggcgatgaacacgccgcgtccgttttccagcgcttcggtaatcaggccgttcaacgaacgcgcgccatagtacggcagcagcgtgatggcgtcggccagcaacggtgcaccgggcttgaaataggcgtctgcgatggcggaaatcgtggtggacaggccgccgcgcaggcaatcgacgatggtgatgacgcccatttgtcgtgccgcgtagagcacgcgctcgagcgcttcgaaacctttggctccgtagcgctcgaacatcggcgtctggaatttgactgctgcggcgcgcccgttggcggcctgcagcatacgcatggagaagagttcggcgccttcggcgtcgacgttgtatccccagtcggtgaggagcttgcgatgcgggtcaatgcccacacacagcggcccgtatttggccattgaattgcttaatcgcagaccgaaatccgaacgttgtgcctgcaattcctcactgctgagtgtagtcatcagaactcccgtcgctccaattcgaacagctgcttcgaatgctcctgaatgctcatgatctgataatcattatgcttcacggcctcgatagcgagcagtgcggcctggaactcggtgatggtggtgaactgcggcagatcggcggcaatggcggcggcacggatggagtagccgtcggaacgggagccgcgcgagttcggcgtgttgaggatcatgtcgatcttgccttcctcgatgagctgaaccacgttcttgcccacggatccggcagcgtgatgcacctcgaccggggcttccggatcggtgtccacgcgggtgctgatcttgtccacgatgttcgactcgatgccgtaacggcgaagcacggaggcggtgccctcggtggcccagagcttgaatccaagctcctcgagacgaacggcgatcaacggcagctgacgcttgtcggtgtcgttcacggagatgaacacgttgccgtgggtcggcaggccaccgtcgtaggcggcgagctggctcttggcgaaggcgtgcgggaagtcacggtcgaagcccatgacctcaccggtggaacgcatctcaggtccgagcaggatgtcgacggtcttgcccaccggggtgcggaagcgcttgaacggcagcacggattccttaaccgcgacctgctggccggggtggatgtcgccgccgtcgcccttaggcagcagcagaccgttggcacgctgatcggcgatggtttcgccggccatgatgcgggcagcagccttggccagtgccacgccggtggccttggaggcgaacggcacggtacgggaggcgcgcgggttggcttcgatcacgtacagcgtgttggccatgaaggcgtactgcacgttgatcaggccctgcacatggcagcccttggcgatggcgtaggtgccttcacgcaggcgacgaatctggtcgtcggacagggtggacggaggcagggtgcaggcggcgtcaccggagtggacaccggcctcctcgacgtgctccataatgccgccgatgtatagttcctcgccgtcgaacagtgcgtcgacatcgatttcgatggcgtcttgcaggaacttgtcgatgagcagcggggagggcaggcggccggagaccacggtatcggccttggcctcggcaagtgcgcggtccacgtacttgttgagctgcttgtcatcgtagacgatttccatgccacgaccgccgagcacgtagctcgggcgcacgagcaccgggtaaccgatgcggtgggcggcttccttggcctcttcgaggctcagggcggtgccgtaacgcggggcgttcatctccgccttcttgagtacttcgccgaacagctcacggttctcggccaagtcgatggattccggggtggtgccgagaatcggcacgccggcagccttcagacgcgcggccagggacagcggggtctggccgccgagctggacgatgacgcccttgaccgggcccatcttcttctcggcctcgtagatctcgagcacgtcttcgaaggtgagcggctcgaagtagaggcggtcggacatgtcgtaatcggtggacacggtctccgggttgcagttgaccatgatggtgtcatagtccttgccaagctcctgcacggcgtgcacgcacgtgtagtcgaactcgatgccctgaccgatgcggttcgggccggagccgaggatgatcacagcctcgcgttcgcgcgggcgcagctcggtttcgtcggcgtagcagctgtagtagtacggcgtggcggcgtcgaactcggcggcgcaggtgtcgacggtcttgtagaccgggcgcagaccgtaggtccaacgcagttcgcggatggtgttctcgccttcatcgcccaaaccacgcaggtgggccacctgcacgtcggacagaccggcgagcttggccttcttgagcagcttcggggtgagggtttcggcctcgcgcaccgtcatggcggtctcattgatgaggaagatctgcttcaggaaccacgggtcgatcttggtggccgcgaacacctgctccagcgtggcaccgccccagatggcgcgcatgagctgcaggtaacggtgttcggtcggggtgtggatggcctcaagcagttcggccacttcttcggcggacggcttctcgccatcccaattgaagcccatgtggcgcttgtcgatggagcgcatggccttgccgagggactcctggaagttgccggccagggccatggcctcgcccacggacttcatggaggtggtcagggtggggtcggcgcccgggaacttctcgaaagcgaagcgcggcaccttggtgaccacgtagtcgatggtcggctcgaaggaggccggcgtggactgggtgatgtcgttgcgaatctcgtcgagcgtgtagccgagggccagcttggtggcgatcttggcgatcgggaagccggtggccttggaggccagtgcggaggaacgggagacgcgcgggttcatctcgatgacgatgatgcggccggtgtccggatgaacagcgaactggatgttgcagccgccggtgtccacgcccacgccacggatgatggcgatgccgatgtcacgcagcttctggtattcgcggtcggtcagggtgaagcagggggccacggtgatggagtcaccggtgtgcacgccgaccgggtcgacgttctcgatcgggcagacgaccacgacgttgtcgttgcggtcgcgcatgagctcgagctcgaattccttccaaccctcgatgccctcttcgatcaggacttcgtcggtgggcgagtaatggatgccggcgccggcgatgcggtgcagctcctcctcgttgtgggcgatgccggagcccaggccgcccatggtgaagctcgggcgcacgaccagcgggtagccgaacttctcggcgatcttgtcgacttcctcgatgctgtgggcgatgtcggagcgggcggattcggcgccggcctcgtcaacgaccttcttgaacagttcacggtcctcgccacggtcgatggcttccagggaagcaccgatcagttcgacgttgtacttcttcaggacgccggcctcgcccagcgccatggcggcgttgagcgcggtctggccgcccaaggtgggcaggagcgcgtcggggcgttccttggcgatgatctgctcgaggatcggggtggcgatcggctcgatgtaggtggcgtcagccatctccgggtcggtcatgatggtggccgggttggagttgacgaggatgacgcggatgccttcctcacgaaggacgcggcatgcctgggtgcccgagtaatcgaactccgcagcctgaccgatcacgatcgggccggagccgatgaccatcacggatttgatgtcggtgcgcttcggcatatcacttaccttccttggagttgttcttcataagttcgcagaaacggtcgaacaggtaggccgcatcgtgcgggcctgctgcggcctccgggtggtactgcacggagaatgcggggatgtccacgcactgcaggccttcgaccacgtcgtcgttcagatcgatgtgggagacgaacaccttgccgtacttgccgttttcaaacggcgcgtcgacctgcttgccgatcggggcgtcgaccgcgaagccgtggttgtgggcggtgacctcgaccttgccggtggtcagatccttgaccggctggttgatgccgcggtggccgaacttgagcttgtaggtgccgaagccgagtgcgcggccgagcagctggttgccaaagcagatgccgaagaacgggtagccggcgtcaagtacctggcgcagcagctcgatttcgggaccggcctgttccgggtcgcccgggccgttggagaagaagacgccgtccgggttcaggttctcgatttcggcgaaggtgatggtggagggcaccacgtgcacgcggcagccgcgttcggccatgcggtgcggggtcatgcccttgatgccgaggtccacagcggccacggtgtacagcggctccttgccttcgtactcgccgcacggttcgatggtgtaggtctccttggtggacacctcgtcgtacaggctcagaccctgcatctgcggggtgttcttgacgtcttcgagcagctgctcgatggtcttgagcgcgccggtggcctgatcggtcagggcgtcgccggagaagatgccggcgcgcatcacgcctgcggaacgcaggtggcgcaccagcttgcgggtgtcgatgtggctcaggccgacgatgccgttcttggcgaggtcgtcgtccaggctgccttcggcacgccagttgctcacgttcggagagggatcacgcacaatgtatccggcaacccagatgcgggaggactcagggtcttcgctgttgacgccggtatcgccgatgtgcgggaacgtctgcacaacgatctggcgatcgtagctcggatcggtgagcgtctcctggtatccggtcataccggtggcgaagacgatctcaccggtcgtctcgccgagggcgccgtatggctcccccacatatacctgtccgtcttccaaaacgaggactgcatcgtccttgtcatacatcggaattgcgatggtcccggactcgttctggctcaccaaaacccccttatgtttttcgggtattcgtaccaaggttaacggccagcgcagactcacacgccgttggacgcaaagtctcacccccgctggcggggctgtcggcaaggtgccgacttgagaatgtacggcggcacaagtgtccgcccatgaaaaagcctcccgaatggggaggctgaacaacaaatgactaatcgaccgtcggctgaatctcagcggacggggcagcaggctcgtcggatgcaccggacgaatcgggcgaatcggaaacatcgccctcatcggtcggctcggatgcggcggcagcggaatcggacgattcctcatcggcctcttctgccacggactccggtgccggtgctgcattcttggcggtgcacaccgcagacagcaggccatggatgaaagcgggcgaatcgtcatcgcacagggtcttggccaatgccagagcctcgtcgatggcgaccttgtccggcacatcatcggtgaacagaatctcccaagcggcgatacgcagaatgttgcgatcgaccacgcccatacggcggaccttccaacccgtggagtgttcgtccagggtcatgtcgatctgacgacggtgctcggccacgcccttgacgatttcaatggcatagtcgggaagcggggtctgggcaccgggatgtgcgatgcgctcgtcaagcagggagagaatatcctggcttttttcgtcggcttcgtacagggtgttcagagcccttttgcgcgcggtggaacgtgccatactgctgctgtcctagtcctttatacggtcggtcgtctgttgaggatgcggagatcagttgttctcgcggccggtgtaggaaccgtcctcggtgttgatcttgacgcggtcgccctcattgatgaacagcgggacctgaatctcggctccggtctcaacggtggccggcttggtgccggcgttggagcggttgccctgcaggcccggctcggtgtgggtgatggtcaggaccacggagcccggcagatcgacgctcagcggggtgccgtcgtggaaggagaccaggcagtcggtgccttcgagcaggaacttggccttgtcgcccagaagggtcttcggaaccatgatctgatcgtaggtggtcatgtccatgaacacgaagttgtcaccgtcctcgtaggagtactggagagtgcggttgtccacggtctcgaattccatcttcatgcccgcgttgaaggtcttgtcgacgatcttgccggagagcacgttcttgatggtggtgcgcacgaaggcggggcccttgcccggcttgacgtgctggaacttcatgacggtccacagctgcccgtcgaggttcaggacggatccgttcttgatgtcgttagtagtctgtgccacgttattcacctatttcaaattcaaactagcttaggcaaagcccaaaaattgcctcggctattatgccacaccgggtatacaggaagtgaacgctggggtttcccatgtgcccccggctagactggatgaatatgcgatccttcttcgaatccatatccgtgtcctgcgtcatccccgcgcaatcgccggcggacgacgaacgcacggtgttcgagaacctgtcctttgctgtggagcgcggcgagatcgtcgatctggtgggaccgtccggctccggcaagtcgagtctgttgaccgcgtgcgcccggctcaacccgcatgcgcacggcgcgttcgcccttgaaggcaagggcagcggcgagttcacgccgcagcagtggcggcgggatgtcgcctacctgccgcagaagccgattctgacgggcaagaacgtggccgaggcgatccgcctgccctggacgctcgcgattcgcggcaagggcggcaagggcgagcatctgctgcccgacgagcgcatccgcacgacgttggacgcgatgggctgcgaggacatcgatctggagcgcgccccgcacgacctgtccggcggccaggcggcccgcgtggccctggcccgcacactgctcaccgatccgaaggtgctgctggccgacgaggtagatgccggtctcgacgacgacaacgcggccaaggtggctacaatcatggcggacgcggccgcacacggcatggcgatcatccgcatccgccaccgtccgccggacggacgggccacccgcacgctgacactggacaaggggcggctgaccgaacacgagatgacggatccggcggcgcaggacgcgaacgcggtgtctgccggcgccgatgaaaatgaggagacgcaggcatgagcggcgatctgggcaattcctacaacatcgatatctggggtctgctcatcgcgctgggcatggtggccgtggcggccatcatcagcgaactgatgcacatgggcatcggcaagaccctgatgtggtcatcgtgccgcgcattggtgcagctgtgcgccatgggcttcatcatcggctacgtgatccggtcgaacagcgtatggatggtgttcgccctgatggcggtcatgctggtggcggccgtgcagatcgtgatgtcccgcgcacgcggcatccccaagggccttgccgggccgatcttcctgagcctggtcatcaccatgctgctgatgctggcgctggtcaccgagctcatcgtgcgcccgcacccgtggtacgcgccccagctggtggtgcccctgaccggcatgctgctgggcaacaccgtaaccgccttggcggtgggattgagccgtttctacgagagcatggaggagcggcgtgacgaggtggatatgatgctggcgctgggagcgaccccatgggagtcggcccgcccgtccatcgtctcgtcgattcgcctgggcctgctgcccaccaccgcctcgctggcgtccagcggcatcgtgacgatcccgggcatgatggccggtcaggtgatcgccggcggcgacccgctcaacgccgccaagtaccagttcgtggtcctcgacgccatcgccgcgctgaccctgctggccgacggcctgatcatggtcatgatctaccgcacctgcttcaccgccgacgaccaataccgcccgcccgaagcgcgctaatcagctaagctccctctgataagctccctctgacgagggagctgtcgaacgcaacgagactgagggagagaccaccctacgcgatggtgaccagcgtgccgtccggcacctggtcatagaaccattgcgcgtcggccacggccaggcgcacgcagccgtgcgaggcgggctggccgagtttggcaccctcctccggcagatagtcgccgaaggcctcgccggtcggcaccgagtggaacaggtacgaaccgtagaactgcacccaatagtcggcgcccatgccttcttcggcattgtagaagtgttcaccgcgcgtatcgatggtgtacgagccgtgcggggtggcgtcgtcgacgccggtactggcgatcatcgtataaatggtctggccaccggacttgacgtacacccgttgtttggcgagactgacctccacgctcaggtcggagtactgggataggtcgggctgtttgccggtcggtcccttccagtccacgctttgcgcggctttgtcatcgccgttctgcgtgttctgcgtcttccgcgacccgccctgtttgccgctatcgggaacctgcttgcgggtaacggccgtgggctcgttcgccgctgcggttgcggcggcggttgcggtgtcggctcgcggccagctgcgctgcgccgccgcggtctcgactccggcgccgatcaggcagaacaggatacagcaggcgaccactccgcgccgaatcacgtagacccgatcgcgactccaattcacgttcaacgtcggcagcctcaccatatgcctcttctcaccacaaagaccattcgggtcgattgtaaacaggcattgtgacgccctacgcctcggtttcagccgtgatctcgactgcaggaacggcatcgtccggggaatcttcgcccgacgccggcaccgtccagcgccgccgcagcagcatccacaggccgatgatcatggtcaccgcaccaagcccgatgccgaacagtcccgaggattgcgccgcgtgcgcggttccctgggattccaaaagcatgtcctgcgtgaccaccagcgagagcatcgcgtcgatgaaggtcacgaacttgaccgacgagtcgatgggattgtgcgttttgtgcgcaataaccataccgcgaatcgcaatcaagaagaacccgcaacttacgcagcagacggtcaagagcctcaaggaggcgttctggaagctgtacgagaccaagccgatcgagaagatctcggtgcgtcagatcaccgaactcgccggctacaaccacgccacgttctacctgtatttctcgtccgtgcgtgacgtgcgtgaccagatcgaagacgacctcatcgcccagcgagacctcatattgaagcagtgcatgcatgacggcacactggaaatgggccagcatgtcggctcgcgtgctgtgttctgtggatgtcatcgtcgtcaccgatccttgcgtgtatcggtttgttgtccgtgtgcacatcacactgtaagcgtttccgcaattgtcgctatcggcgacgcatacgcatgccgatgagccagatcagagaacgacgtaagtacaacgaaggctcccctgaggggagccttccatcgtgatatacgtcacgcacgaacattcgtcattcgtgcctcacgcctgcgcagcggcggcatccgcggcgtcgttcttcagcgcgcgcagcagggccttgttgcgggattcgatgatgcgcttgccgtcctcgccctgccaggagaagaagccctggccggttttggcgccgagattgccttccctgaccttctcggcgagcagcgggctcgggccggtgccgttgtccatatcgtcgaacaggtaagtgctgatgttatagaacacatcgaggccgccgaggtcgatgctggcgagggggccgaccagattccagcgacggccgaggctgtacttcatcacgtcatccacggtggccgcgtccgcgatgccctgctggacgatgtggaacgcctcgcgcagcacggccagttgcaggcgattgcccacaaagcccagcgattccttcttgatcttcgccggcttcttgccgatcttggccatgaggtcgaaggtgatgtccactaccttcgggtcggtcttctcacccggcaccacttcgaccagcggcatcaactgcgcggggttccagaagtgcgccaccacgaagcgctcggggtgccccatcaccgactgcagcgcggtggggctcaggccggaggtgttcgtggacagaatcgcgtccttgggggcggcgtgctccacttcggtccagacggacttcttgatgtcaaggttctcggccacggattcgatgacgaagtccacgtccgccacgccgcttgcatagtcggcgtaaccggtgatgcgggccagcaccgcgtccacggtgtcgccgtccttgagcagtccggcttcggcgaagtcctcggcatccgaacgaatcgccttcatcgccttctccagcgaggcctcgccgcggccgaccagatgcaccggatatccggccaacgcgaactgcaacgtgatcgcgtggcccatggttcccgtgccgacgttcgcaatcgtcttgatatcgtccactgtctcaatcacggagaccccttctttccggcggttcgtctggcgttggtgtacgcatgaacagcaccgtgccgttatgcgtttgttcgcattctatgccgatttcgctacgtgaacatttgctgaacatttcgcggattcgactagtacaaatccccatatcagcacaaaaacgtggtgccgcaacaccgaagtgttacagcaccacgctgaaatgttcatgtcgttacgctgccgtcgcgcacccacagcggaatcgataggaaacctcaccggagtaggtgaacacgggggcgaccagcatggacggaccgaacatatactgacggtccagcgtgcggcatgccgggtcatcggggaattccacgaacatggaacgcatgaccggagtaccgttcgcatgaggctgcaggccaagctggtagacatacggcatgagttcaagcttgagcttggtgaactcgcgtaccacatccacggcggtctggccgggcaccaatgcgacgccgttcttctcgtcttcctcgtcgaacagccacggcacacggtacacggtggaaccgtgcagtcgcgagtgggagccgagcatgccgaacgccacccaacgcttgtagacggccgggtccgggaacgcaccttcgaaaccgccggatgtcgtgactccagaagccgaagccggaggaggtcagcgacaggccggcacgcagggactgggccatgccattgaaggtggattcgcagtcaccgccccagtgcacgggcttctgctggccgccgacggtggcggagcgcgcatacaggcaggcgttgcccttgccgtaggtttcttcgatggcttcgaacacggcctggttgtacagctgggtgtaccagttgtgcatggagagcttcggagagccgtcataccagacgacgtcgcgcgggatgcgctcgccgaaatcggtcttgatggcgtccacgccctgattcagcagggccttgaccttgtccttgaaccattcacgggcggccgggttggtgaagtccaccaagcccatgccggcctgccagaagtcggtctgccagacttcgccattgggcttgcgcaccagatagcccttgtcttcgtgcaggcgcttcagcgtggattcgatgtcgccgaagaaacgcttgtcccactcgaaatcgcaccaatggaactcgcgcatccagtagcagtcgtagtggaaggcggccagcggaatatcacgctcggccataccgtcgatgaaggagttgatggtggcctcggtgttctcggaaccgatctcaaaggagacatggccgcggttgttgaccagtacgccatacccattggaggtcatgtagaacgggatgtccttgtagccctgctcggaagcagtgccgccatcctcattccagatgtcgacgctctgaccattcttcacgtaagcgccgaagcgttcgcccaagccgtatacgtcttcgccaaccgacagatgcagctggatggcaatgaacacgtcggattcatcacgggcggaaccgtccatggtcacaccgaattcgctgaccggctgggcggtgacgttcgattcggcaccgagcttgaatcggcccagcgacttgcctgcggactcagtgagcaccttgccgtcctcgccgatgaaggtcaggttccagggggcgcccttgacgaccttcacggtaagtccgccagtggtcagcgtgacatccgcgccattgacgccgacttcgccgtcgccattgccgttcgcctgaacggtcacgtaatcacggttgccgggttcgtcggcattgagcgggaatccggggtattcggtggcgccttgccagtgttcggcacacacacgaatcacgccttccgcaggtgtggtgatgtccacattgaatgtgggcaggttcagggtatcgtatcggccgcgcaccacggaggtcggggcgaggacgttgaggctttcggtggtggcatccgccgccagttcgtaggcttcacgagcgtagagggcgtcgacgccgtcacgaatcatccagtagccgttggtgaacttcattgttgctgctccttggtggagaggtggtttcgaccgccagggaacaaggcagccgaaaccaaaatcaatatgtgctgcttgttgattgaattgcctgttgtgcgaatgaccttacttcaccgcgccggtggtgatgccgtaccagtcgccggagcccatcatgccttgctcatcgtacttgccggtgtcggccaaggaaccggtgataatcttgtcccagccatattcggacacgtaatcgttgaggttggtgagcaggccttggctggcgagcaggccggacgtggcgttgcccttgttgtattccgtaacgtccggagcgtcgtcggagttgaggacctgggaggcgttctggcgaatctgttcgaaggccttcttctcgaattcgaccttgacgccggtctcacacattttcatgctttatgcaaaaaatgtgaggcatacgcacatttcccatcaaacgcacaggtgcaagaatggcagcaattcgccatttttgaaatcaccatgtgcgtttgacggcgcgtaagcctcacattgttctcagcaggaccgaatttctgcgagccccccctatagcgctcccctacgcaatatgtccgcaaacgaccacaccacatgggcgatacgcgccaattcggcgtaacggccgatggacagccactgcacacggtaccgttcgaaccacaactccaaatcggcggcaagacgggcgcggcgcgaggcatccagcgcacggccggtcacatccttggtgccacaggcgtcctcgccgccagccaataccagcagttcctcacccagtctattgaacaaccgctgcccatccagcatcacccacagcagctccgggttcaatcctcctcgtgccgagccatcgagcaccgcgacaaccgcactgccgcaatcaatcaacgcccggtcgcaatcccggcgtcgttcgagacgggcatggttccgcaggagcaatcggcggcgcgcgtcggcgcatcccagcgcacggtcaaacatgagctctcccccgcacgaccgttccacatacgatgccacatccgtattcagcatgccggtgccggaaccgtattccagttccagcacttgcacggcgaggtcccaggggaacgacactccatcggagtcgatgcgagcgagtgaatccataagccaaccggattcgtcgccatacgccagattagaaatccgatggttcatttcgcatgcgtcaattgcaaccgggttccacgcgttttgcgcaccgtagcacagtcccggcacgctcaaccgcggatcattgacatgcccatagtcaccccaatcggtgaccaccatgccttccgcaccatatttgagcccagccaccgccatgcggtacgtgttcagccaggcaccgtcatagtcggggaagaaccggctccacgcacgcacggcagggcacacgaattggcggcggccttgtgatgcgatggtctggatcttgctttcgtcgatatccggctcatacatccagttgagcatcgtgatgtcgccgggcagcaagtccatggtgtgcggattctcgagcgcgatatccgcccacagcatcggttgtagaccacgatgggcaagcgtgctgcataggtctttgacgaaatcggcatacagctcatcgcgactggcgcccggcgagtcctgtacggaccggccacggcccaagtcgaaagtctcatcgccaccaatattgaaggaccgcgagcggaacagcggcgcgtattcctcgattaggcgcgaggcgaaatcgtgcgacttggggttggctgcgttcagtgtgtggtgttccattcgttcgatgaaactgaacggacggtcggcgtcttcggggaactctcccagtccacgatgttcacgggtgcgcaggttcatatacatgtgcccgaaagtggccaaggacggcaccagttcgatgccgtggtgtgcgcagtattcgtccaggaacatgatgtcgtcggccgtgagcgggtcagtgccgcgccacgcttcgctgagctcgccgaaagcgaaggcatgttccacgtacagctggaattggttgtacttatacaacgccagctggtcgatgaaccaggtgaggaacgccatcgtcggcacacgcccgcgcgtcacgtcaagactgtaggcgcgcaccgcgaacgcaggcttgtcttggatatgcaggcagggcaaggtccgcgaggtttgcctgatcatctgccgcagtgtctgcatgccgtaccgcaatccgctttcgctgccaccacgcacggcgatggtatctgaggcgaacacatccagcgtgtattcgtcatgcgccaatcgcgcatccacacacagcaatatgacggtgccgttcatcgctgccggcgcacccgcgcccgcacccgcacccacgcccgcatctcgcgctttttcggcggcattggcaccggcgtcggcttcatctgtggctgtgagtactcggcgcgtacggacggcgacgccgcagtaacgctcgagttcgctggacagctgctcgattggcagcgtttcccaggtctcatcggcatcttcggtgacggcatattcgggaattcgtttctcgatcgtcaccaaggacccgatcatagccgtgccatgcgtgtattccaatgtcaccggagcgggaatcagggtgagacacggcgttgcggcatcagccttatattcgaatgtgggcacagctgttcctttcatactgtttttattatcgttcatccgctgacggcaggcgacacgcggtcacgccgccatcagcggacgaatcgtttggtgaggtacggcggcatacgctatttcacggcaccggtcgtcacacccttcatgatgttgcgctggatgagcatgaagaacaccaccaccggcaacgagaaggtcaccgaagcggccatctgcccgccgaaatcggtgcccatggtgggtgtcgagaaggacgacagccataccggcagcgtgtacttcgactggtccttcatgaacgtatgggcgatcatgtagtcgttccaggcgttgatgaacgcgaacaccgaggtcgagacgatgccgggcgcggccagcgggaaggtgatcttccacaggatctgccagtcgttcgcgccttccacggccgcggattcgaagatgtccttcgggatgttcaggaagaacccgcgcatgttccagatcgcgaacggcagcaccatggcgatgtacgccaggatcaggccgctgtatttgttgagcaggccgagctggttgtagatgatgatctgcgggatgatgccgccagaggtcatctggatggccagcacgaacaccatgatcggcttgcgcccgcggaagcggtacagggtcagggccgtgcacgcgaagaacgcgacaataatcgacaggacgatcgagaggtgcatgggccagaacacgggggtcgtggtcatgatctcatcgcgcggctttacggcggtgataatcatccagtagaccgggaagaaccatacgacgcagaacagcagggcgaggatagtggtgccggcgcggcgcgcgatcttgccggggttggttcggcggcggggcggtgcagactgcgctgcgccatgcgatacggcccgtggattctcaacacatttcataaggacgacccgctatttcagggattcgccaatatcagcgtgccagtcgccatttccggcgtcggctatggcagcgccaccccttccccaccgtcgacatcgacaaccgactcgcttcacgcaagctcaccgagcatatgttggggcgcgggtatcgacgaatcgcctatatcatcggaccgtcgtacttgccgacgtcgacgccgacgccagcgtgcccgcagctgaccaccgtgcgccagccaatggacgcattcggcgtcagcttggctaccctagtgcttgaccagatcgaggaccggccgttccagcgcacggggctcctgcccaccgaggtcgtagccagataggcgcgcagagaacggttctcaataatgtctgtgcacacttctctacgcccgaagcacacatggaatatgccctaatcactgccatgtcgccatttgcgatgatgtgagattgttatgttcttgttcatttgagcgcacagatactactgagaaccgttctctgcgcaaatagacaatgtggataactccataagctggaaccacattgccctgcctggcttgcattcaagtccaaatcagctttacggtcgcaccatgagctcttttatgcatgaggatattgtcggccgacgccgagcagaacgtgaacgctgcaatgatgctgcgcgccgttcgaaaggtccattgctggtgggatacatcaatgcggccaactactacggcgcgcccatcccccgacattgcacgctatctgttgatgccgtgcacgcctgtgtttccagtgccaacaaacgcagacgaatcaaaggcgtggtcttccatgtgtttaagggaaaactggatatccgcaaaaaggattatgaacagttctggattgcctcgccggtcatgatgtgggctcagatggcccaatactctacattggaggaacttgcggccattggagcctctttgatgagccgcgataaacggcgcagaatggccactcgcaaggatttcgatacttacttggaaatcagtccgcggttcataggtcgtaacaaatgccacgaggcactgccctacatgacagagaacacggattctccgccggaaaacacgctgtttgggatgctgaaggattcaggcttgggatgccccaccgccaactatcgcgtgaatatcggcaactcatacgtcatattggatatggcatatccggactgccgcgtcgcgttcgaatatcagggagcctatcacgccgatccggcacaaatgcgaatcgacgcggcaaagcgaaacgcattgcaactgctcggctggatcgtcattctcgtcactgcggatgacctgagaacagccgacacgcggcatcgttttatcgagatggcccatgtcgtggtgtcccggcaacgcaatctcgccgattggaaccgctcatgggccattacctcttagcatcgcaccgacaatgcgctatgccgttatttactgcgaggcacccgccagatatcgggctcaacgtagatctcccattcataccaaggcagcgcggcacggcgtcctcgtccatgtgaatggcctgcaggttaatgagcctatccacgccgacagtgcgctccattgcctcgaccaccaggtcgcgggtgctgtggtcaagcgattcgcccaccagcagcgaaccggacttaaacgccaacgccgcctacaaaagtgtgaggctgcgcaggctcacactgccaacagccgttcagccaaccctcggaaggtctggccaatgccatccgtacgcaaagcgccgtcggcgtccagcaccgccggccggccggcctcgccggtctcgcgcacttcgggttccagcggcagctgggccatcagcggcacgtcatagcccagcgcctgagtgagctgttcagacacgcgctgaccgccgccggcaccgaaaatctccagcttctcgcccttgtgctcgtagtagctcatgttctccaccacgccacgcaccttcatcggcacctgcagggccacgagtccggagcgcacggcgatgtcagaagcggagggctgcggggtggtgaccaccacgagttcggcgttgggcagcgcctgggccacggaaatcgccatgtcgccggtgccgggagccaagtcgagcaagaggacgtccggctcgccccaccatacgtcagacaggaactgttccaaggagcgctgcagtcgcggcccacgccacagaatcgcccggtcagcaccggcgaacatgccgatggagatcagtttcacgccccacgcggtgaccggcatgagcatgccattcagattggtgggctgtgtatgcacgccgaacaggcgcggcagcgagaagccataaatgtccgcatcgatggcggccgtgtcgaagccgagggccgcaaacgcggcggccaggttcgcggtaaccgaggacttgccgacgccgcccttaccggaggcgatggcgaagatgcgggtcttgacacccggtttgctgaaggggttctgcttgcgttcggccttgaggtcggcgaccagatcggccagcttgccacggctcatcgaaccgacttcgatatgaggcagcagctgtgcgcccggataggagctgaccgcgccattgatctggctggtgatggtctcgctcagtgggcatccgggaaccgtcagctcaacgtgcacggtgacgtcgtaagtgccggcgtccgacgatgcgggcgcggcttcgatggcggcaatcatgccgaggtcggtgaccgaacgaccgagctcggggtcgatgaccttgctcaggcgttcgtagatgtcggcttcgatctgacgtgcgtcgctcataaatccgtatcctcctttagggcctgttctaccctagcgtgtgatgcggcggcatgccagagggagtggagtaagtcacactggggcgggattcgctttttctctcccccagtcagcctaaaggctgacagccccctcatcagagggggttaatgaagcgtctgagggggctattttagatggtgccggtggctaggagctgggcgaattgggtttcgctcagcatggggatgccgagttcctcggccttggcggccttggagccggcgtttgcgccaatcaccacgtaatcggtcttcttgctcaccgaaccggccgccttgccgccgcgctcgataatcgcctctttggcggaatcacgcgaatagccctccaacgaaccggtgaccaccacggttttgccggccagcgtctgcggcaacgaactggtctcggcctcgtcgacgcccacgccggcggcctgccaagcacgcaaagtcgcgccgcgccagtcgccgggttcgcgggtggcggcgaaccagttcaccaccgattcggcgatttccgggcccaccccgtcgatggccgtcagatcttcaatcgtggcgttttcgatggctgccagcgagcccatcgccgaggcaatcaggcgtgcggtaggcggaccgagccggcgaatcgacaacgcgaccagcacacgccacaggtcggcgtgacgggccttgtccatttcgtcgaacatcttgcgcgtgttttcgccgggccgaatgatcaccggtacatccgtgacgccagtgcgcgtggtcttgtgatccacgcgcacgataaccgcgtcggccggcacgtcatactcaggataggaggctgcggcaaagcccggcatagtaccaagtggagcctcagccccggtaggtgcgccggtcgtctcgctggcggtatctccctgtgtttcggcagattcgattgcggcctccccttgcgcgcgttcggccagctgcttggccgtgagctttttggccggcgtgggcgcggtccagaaggcaggcacctgatgccacaggccagagccgccgacacgcttacgcacctttttcttcttaccgttcgcaccgaccgtctcatgcacctcgacgattgcggcctcacgccacacgcgcacgtcgcgcagatcggcggcggtcaggttgaacaacccggattcgttggacaacaccggcttctgcgcggccggcaattccagcccttccaccggctcgtacgggtcaggctcttcgccgggggcgaccagaacctcggtgatgttcggcgcgtaggtcgccaccgaatcaggccggttctcctccgggttggtcagagcgatggccgattgttcgcccaagtgctcgatgtcgaacgccttgcgtgaggccagcgaaatcacgcgctcggtcaactgggccgggcagctctccacattcggacagcgaatgtccttgtcaccctccttggcgggtgacagtttcgcgccgcatgaagggcagaactcgggcatgacgaattcgcgcagctggtcctcacgccctttgcgccgttcaagcaccgggccgaccagttcgggaatcacatcgccggccttgcgcaccaccacggtgtcgccgatcagaatgcccttgcgtttgacttcaaatccattgtgcagcgtggtacgagccacggtggagccggccacgtagacaggtttgagcacggcgaccggcgtcacacggccggtacgccccacctgcacggtgatgttgagcagttcggtgttgacctcttcgggcgggtatttgtaggcgatggcccagcgcggcgcgcgcgaagtggcgccgagggtacgctgcaggcccaggtcatcgaccttgacgacgatgccgtcaagtgcatgctcgatgtcgccacgatgctcgccgtagtactcgatcatgtccaggatctcctggaatgaggtcaccgcacgattgtgcggggagaccggcacgccccacttggtgtatagatcgtaggcctgcgactggtcggcgaccacgtcatgggtgccgcgcggatggtccggcccccaagtgagctgccccagaccatgcgcatagaagctcaggcgacgggtggcggtgatgcgagggtctttttgacgcagcgagccggcagccgcgttgcgtgggttggcgaagggcgctcgtccggcgtcctcctgctcgttgttcagggtgtggaaatcatcccaacgcatgaacacttcgcctcggatttccacgaagtccggaacgtcttccttggggccgccgaggtttgcgggaatggagccgatggttcgcacattcagggtgatgtcttcgccggtaacgccatcgccgcgcgtcaggccctgttcaagcacgccgttgcgatagatgaggttcagggcgaggccgtcgattttgacctcgcagctcatgggcaggggcttggattcgggccaatcgaggtcgcgaatcaccgagtcgtaccaatccttgagttcttcgatggagaagacgtcgtcaaggctcatcatgcggctggggtggcgcacggaggcgaagtcgttggagaaggaaccgccgacgcgatgggtgggcgactgcggattgtccagtgaggggaacgccgcttcgagtcgttcgaggcaacgcatgcgcgcgtcgtaggcggcgtcggagctgacgggtgagtcgtcgatgtagtaggcgatctgatcggattccacccatgcggccacgcgagcccacaggcgggcggcggcctcagcggtcatcgtgttcacgtcgaaacggtcgaggcgtatcgcgtcgtcgtcagtgggctgcagtgcggctatccattgttcggagccaggggcaaaacgtgcaataccggtatcaggccggacctcggccacatccccatcgtcgaaatcccatgccagttgttcgttcgtgctcatggttgtctatcctagcgggctcggctcccctcggccggctataccgtcaactcccctcaggcggctacgcggatagcgagcgcaggaactgggcttggatgatgtcgatgttatcgccttcgccgtcattcatgcgggccacagccaccgagagcgtgcgggccggcacgaacatgtcctcatccacgcacacgcgagcggcgtcacgcacgatgtcagccacttcgatatgcggccagaccggcagatcatgcgtggcaagcacatgggcggcggcctccaccgattcaggcaccggtatgcactgcgagtccgcacgggaaaccagttcctgcagttcgctttccagcgaaccaatggccccgggagcgatgtgatcgctcataatgtaggctgcggcggctgtgtcgaaccggtcaagcatccattcggcgtacgcgaaccggtaataggcgaacgcggcatcgtcgcggtccaaggccacgcgcagagcattcaggcaggcggcgcgtgccgaatcccaatcctcattgcgggccagttgaatggcgagcttcagatgtgagagcgggtaggcgggcgcgtacgccaccatacggttgagatgcgggatggccgcctcggcacccttgatctgactcaacacgtcagccagctccatgtgcgcgtagaacagattgtccgggataagcaccgtacgctcgtccaatgtggcgaacagccggttgtagaccacgcgctcggcataggagttgaagtatcgaggtacgccatggcctgccgcatacacctggtccaaatgggccacggccgcttcggccgcttcgatggcctgatcggcttggcccgagaacagcatatctcgggcgcgcagacgctccttgtcaagatcgtcggcaagcgtgaacgtgaagtccggcgtgtccttgccatcgatcaacgcactggtgacctgagaggccaaaccggtcagttcgggatcgcatatcgattcgatgacctgcatggctcgctgggccttttccacggagccgagcgacgtgttcctggcgatatcgtggaattcgttgacgccatgctgcagcaggtccactcgctggatagccagtccggcactattctgtgcgcccagcacgtgagcggtcgccggactgaattgacggtcggccagttcgggctcctcctgggatccggtgggagagaaccggctgtccgccaagtcgaagtcggcgctgatgggtttcagaccaccttcgccgtccacgtccatcacggcaccgaacatgcggtaggtttcctcgggattgtcaagcccagcggtgtccagtcgcttgaggaaggcatcacgggtgaaggtgacggtgaccatattgcgcacggtgggattgcggcgcagcacactcatcggatcatcgtccatgccggcggccccatcagcaccgtcagtgccgacgccctcgccgccgataccgcccaggtcgtcgcctgcgccggtatcgtccggcatgccgaacgccatttcgtcgatatcgatgcccttcatcaggtcttcgaactgcgaatcgatggacgcagcgccatcggcgtcagcggattcggccgcggcctgatccgtagcatccgcagacggtccggtaccgttgcctgctcccccggccgtgccgcgttcgtcaccggacgccgtctgcccgaacgtctcctcatgggtgatggggcgggtcgggtcgccatggaaatcaccatctttggggtcggctttggaacccacacgccccaaatcgccactgcgtagatgttcgaaggcgcttagggcctcgctcatcatcgcctcgatggcggaatcctgttcggcaatcgcctcttcaagaccaatggaatcgatgtgcaacgacacctggcgcacggattcgctggtgccgaaacttagcgcggccatcatcaggccgacacgcaggttgtaggcggcgctcattgacgcgcgttcggcgctactcagcgcacgccacgtacgtcgagtggtgtcataccggctatcgggcatcatcgaggtgccggcggtggtgaagccaatggccacttcacccgaatccaagcgcgaccggaactccacgtcaaaccgatacggcaaccgtaaccggcgcaacagtgaagagagggtctgacgatacacccattcgtcgctcctcgccggcgaatacgaaggacgagcggcttgagtgttggtgtcgctcttatcggtccgttctacagcgccctcagcactctcagtactttcagcgctcgcagcattcgtcacacccgaatccggcacgttctgctgggtcagcacatctcgaggatcggggaattcactgcgaatctgtccagccgtgcgtgcggcgatatcgaccaggctcagcacggcccgacgctcctgctcgccatcatacgggtcaagcgccataatcgcagggttctcaatgagtttcatgtcgatttgcgcggcctcggcacgggtcaccgtatcttccgtagggttgcgccccaaggaagcgttgcgctccagccaagcgctcaccgcagcgaatcggttgaggttgccttcgatcttcaaggatttcagcgcctgcccgaatgccaaggacttatcccacgtaaagaaatagccgctcgaatacgtcgaggtgtacaggtgcaacggttcggcgccatgcaccgcttccagtcccggcgtggtgtcgagggcgccggcttcgcgcatcagatcggcgaagtgatcctccagaccggaggcccgcatgccgtgggctcgtgccgccaaagtgtcacgcaccgaacggcgaatcgcaccgattggcgcctcacggttgagacggcggaagatattgccggaaccgaatccgatgagcagaccattgatctgcggcaacatatacgtggcgaagaacgcgatggtaatggcatcgcggtattccaaatcatgacgcatcacaggcggcagattggcacgcatctgctcaagcgtgtaccggttgccggccttgagccatgaggcgagccacgtcatgcgtccggtgtcgtcacgccccaccacgccaccggtaatggccttcacgccgtcagcaccatgaccaaggccacgccccaaaccacgcccatgatgcagcgcacttcccaggccatggcctgcacgggagaaaccggaacgtgaacgcggctcgtcgctttcgcccagccgctcaccgtccggcagagtcacttccttttccttgccgaacataaatcgcgcctgcatatcctgcacgtccatgttggggtcggtgcccacgaatacgcggccatgcgtatcggcgaacgccacctgcgcaaaatgatcgcggtcggggaaaatgccaagcgaaaagccacggcctctggtggagggcagctgcgcccatccaagcaccagcccttccggcacgttctccaattcggggaaggtgcgccgcttgattacaggactcagcgccactgcatggcgagtcagttcgtcgataatgccgcctttacgctcactggtctcccgcaaggcatcgccgaacggattcgtatcgtgcttcttcggcttggacagtcccagatcggccgcgagcgcgttcatcgaatccttcagcccgcccagcagtggcgtgcggttgtgcttcccatggtccgatgtacgttttggcatgattcacattgtctcttgtttgcccgacatcaagcccgaataaagcctatagaataaatgcgtgcattccatagaccacactcgcgcagaccgtccgatgccgtcgaatcatgaacggcgcctgcccagccgcccggatacccggcaccggctgcgtttggtgcgcctgctgatcgccttgctggccgccgtcgccgccatcgccgccatggagtgcatcgtgttcaacctgccgttctggcgtacgctcggagcgagcacggatacgaacgccgtgcataacacgctgggttcgggtctcacgcgccggaatgatggcatgttgaccgtcaccgatccgaccaaggcctatcttgaactgaccgcggacggcacgtcggattacctacgcatcgataccgagagcagcaaggtcatcgataaggcccgcgagcaggccgaggccgaatccaaagcgaacgacgataaggaagtcttcaaaccgctggcgaccattcatgtgcgcgcggatgtcgatggcatcaccggcaaggcccagtcgatgaatcccgacgctattcgcagccattatgtcaaggcgccgggtgccggcatcgtgcgtatttggattcaggaagagcgcggcgcgatcgtaccggtcaccgactcccgcgccaacgtgcacgtaccgttcgtcatcaattggatgcgcgtgctcgccatggccttggtgttgctgatgattgccgtctggaggccgggatcgcacctgtggcgtatcacgcttgacccgtccagcactcggcaacgacttgctttcgtggggcttatggcgattcctaccctgcttatcggcgcatccatcatccacgaactgtggtacgcgtctccgctcgtcttccacgtttccggcgattacacctatgatttcgaccagtatgggcatgtggccgatgcgctggtcgccggccggccctggctcgacttgccggttcccgaacaactggccgccaccgagcacccctatgacgtagccacacgtgcccagctactcgccaatggagccagtccgctctactgggattacgcgtattatgacggtcactggtattcctattttggcgtgttgcccgcagtgctgctgttcgtcccctatcgtctgctgaccggtcataatctgccgacatccgccgccgagtatattctcgtgctgctgttcatcatcttcttctccttgctggtgctgcgcgtcatccatcgcgtgatgccgaagacttcggtggcggccgcgtcgttagtagtggtctcatcgttggtgagcgcgcaagtggggtatttgctgtatcgcacgaacttctatcagataccgttcgccgcatcgctgacgttgacttcgctgggactatggctatggctcggcgcggacacgtcccgccgtccgctgagaccatcggaccgatggcaggcgggcgacgccaagcctctctccctgccacgactggccttgggcgccttgtgcattgcggcgaatttcggatgccgaccgacgttcaccttgaccgcattgcttgcgttccccctgttctggccgcagattcgcgcgctgggcaccggtctgcgcacacgccgtatcaagccgttgcaggcgttgcgcgcgccgctggcggtaatcatccccgccattctcgtcgtgacgcctctgatgacgtggaacatggttcggttcgattccccgttcaatttcggcaatgcgtatcagttctccatatccgatatgacccggtataccaccccgtccgcggatatgcccgccaacatctggtattacctgttcctgccgctgcgcttcatggatcgtttcccgtggctggcgggctctcccgccccgatgccgcaatggggttattacgaggtgatggtcggcgcgattttcacggccacgccactgaccttgatggctttggcgctgcccctgctgcgcagattggaaacacacggcatgcggccatggctgatgtcttgcttggccgtggcggcggtgctggtcgtattcgacagccgcgtcggcggtttgggatggcggtattccgccgatttcggctggctgatctcgctggcgtccataccggggctactgtggctggtcaatgggcgcgaaccgagccgctcattggcgggggccaacgacgccgcttcaggcgatggcatcgcccgcgtcactccgtggcgttggctgatgcgctgggtcgtgatgctggccgtattgtgggcgctgggcatagccatactaagttgcttcgtgcagtcgcgcagcgattcgatgatcgccaacaatccgacgctctggcatcaggttcagtcttggttcaccctgctataggaccggaccgctcggcgacccgccaagcttcagtattctcccagcattccggccggtgttttccaagacctgcggcataatgtatgtgacgtaattcactaatcgtttacccatactgtcgtgagggtttccccgtgtccactgccgtccgtagtcgcgtcttccagctacaccgtttccgctgaggggtacccggattacacggccaacgccatcaccagcgatgaggcggccgccgcataccgtgaggccgccgccggcgacgccgacggttccggcaatgtcggcggtaccagcacggcgagtcagacgaccacggtatcgagcaatgacatcgcctccaccgagcacgagtttctggtgttgggactgatccccaaggtcaagaacaccattaccctgaccatcaccgacaccgacggcaacctcaaggcacagtacaagatggtgctcagttcgggatacatctaccgcgtctaccagtacggcttccgcggcttctacttcgcgtgagccttggcatcgacctcacggccgatgccaatcccccaacggccgattcctatctgctaccgcttcgcagcctcatacttgcggcgaatcagatcctcataaaacgccacagcctcagccggcgctccgtcaaacgcgaccgcgtgctcatccagcaccagtacacggtcgatggcgtattcgggccggcggatcatatccgtgtcatgcgtggcgaaaatcacctgcttgttgtagctgaacaacgccttggccacatgcgcggtgccaatctcatccaatcccttgctcggctcatccgccacaatcgcactcggctcaaagctcagcgcggccgcaatagccagcaggtgccgtttctcggagtccagttcgctggccttggccttggagacctgcgccaaatcaaaatgcgcgaacagattgccgatgcgcgcatgacgttctgactcgggcaccttgtgctttttcagcgcttcggaaacagcctcggaaatattcgccgcttggtaaaagctgttcggaatctcctcgcggcgaactttgccgaccagattatcgatgcgcttcgcgtccttcttcacagccgggtcaagacgttcctcaccgcccgcaatggtcaccgtgccggcgttggccttcaacgaaccgtccagcagacccagcaatgtggatttgcctgcgccgttcagtccgatcacagccacccgcagctcgctgatggtgatgtccgtgggagcaagtcccacgtgcccatcatcatacgtatgcccggcctgatccaaagtgaacgtcagcgacgccgggcgtggcagttctttcggtctaaacaagaatcccatgccgctattgtacgtggagtacaggtatggtgccggcaaacaccggcctatcgcagcaaagcggcgacggtattgagcacggcgcggatgccacgctcgaattcgtccggttcgggtagcagggaaacggccaggtatccattggaagtcatgtcgaagaagtagccgggctgtccggtgagttggtgctcgtcaatcaaccgcagcaccagctcgttctcatcgatgactgaaggcactcgtagcagcacgttccagccgccttcggcccgtagcacgctgaccagcccgttgggatcggcgtcaagcaactcgtgcaacttggccaggttattgcgcacgcgctcccccacccgtctggtctgtacgggcgcggcgttcaataatgcgggaatccgttcggcgatgatgtcgctcatcggcagataatcatcggcgatgacgtccagtcgacgctgtgcctcggcaacgtcctcggcaggtccggacacctgaatccacccgactttggcgtgcggcgcggccagcattttggagaatccgtctagggcgaaggtgagcacgccgcgctcccccgcgagccgtgcgttgccggggaaaggttcgagagagtaatcgaagaacacttcatcggcgataagggcgatgccgtgctcacggcacaatgtcacgatacgtgcacgctcggttggttttacgtacgaaccggtcggattgttcgggttgatgagcaccaatgctctgacgcgttcgccaccgggctcgctgagcagccgctcgagttcggcgatgtcgatgaaccaggagccgtcgaattgcaactggtattcgaccgtgtcaacgcattcaagccgtgcaatcgactcaatcagcggatagccgggtttgggtgccagcaccgcgtcgccggcatcgcaaagtaacttgatcagccacgaatacgcctcggacgtggagctcagcaagtacagggcgtccgggtcaacgccctcgatggcggtattcgcattgttgaaagcggcatggcgctcgttcccgccctcgctggcggcgggagaagccaactgagggctgcttgcgtctaccgcctttgccgtattgaggaatgcggccaatgcttctcgcgccgcacgcggtccacgcgggtcggccgtatacacgctcggcaccaattcaggtgccagcccgtggcgggtcggattggaatcgttgagtttgctgagtgcgatgccgtttgccttggctgccgcctcggccgccgcaatgggattcggcgcagaaatatccacacgagaagagaaatgcacgctcataccctcccacgatagagcgtggtgccccctgtcccgctctcaatcgcgcaacattcccggaaatgcgtcgctctggacccgaatcacaccctcaaacgcggcacattcccgggaatgcgtcgccacagacctccatacacacgctcactttgcgcaactttcccgggaatgcgtcgcatacctttcctatgcaatgcgaaaggccgcccgactagtcggacggcctgaagcatattcgcgggtcagcgctgcacacccacgctcactggctcactgctgcttggtgctggcatagtaggcggcaccgacgatgccggcctggttacgcagcttggcgggcacgatcggggtcttgatatccacgtacggcaggaacttttcgctctgacggctcacgccgccgccgacggtgaacaggtccgggttgaagtacttctccataaggccgtagtacttggtcagacgcttggcccacttcttgtagcccagttcctcattctcgcgaatcgcggaggaggcatacttctcggcgtccagatgcttggcgctcaggatgatgtgtccgagttcggtgttcgggatgagcacgccgttgtaaatcaaggcggtgccgatgccggtgcccagtgtggtggcgatgaccagaccatcctggcccttggcggcaccgaactggacttcggccaggccggcggcgtcggcgtcgtttaccacgacgaccgggcggccgcaggcttcggagaacacttcagtaacatccacaccaatccaagactggtcgaggttagccatgaagtcgagcttctggccgggcttgatcggcgcggggaaagcgatgccaacgggtgcggattcaggcacttcgaagtggtcgagctgctgcttgacgattttagccacggcctgaggagtggagacctcgggagtgagaatcttcaatcgcggctcggcgaaatcgcccttggtcagatcgacgggtgcggccttgatgccggaaccgccaatgtcaacaccgaaagcctgtgcagtttcaatcatcgttgaccttcctttccatacgttttcatcagttcgtaaggttgcgcccagtttaacgcgaattacgctcaacacgaaaccattacacaccaatcatgcaaacgtgtgcatcgtcgccggtcactgcgtaccctattcgtatcgtttttcaagcctgacaatgggcgatgcatgcgatttcgcatactaggaaaaatcggcgtctatggcggactgactctgtgtcgcgcgcgataatgagaggtatggcagaacatacccaacttattgatgcaattaacatccgcaccgccgtacgcgcctacgatgatgagccgatcgacgacgatacggcccgccagttcgagatggcgcttcagccgatcaacctactcggcgatctcaacatccagctggtgcgcgaccagcccaaggtgttcgctgaagccaatgcttcaggtcatctgaccaatgcggcgaattatctggccatcgtcggccccgcgaacgatgcggaagccaaagagcgtgccggcttctatgccgaacgcatggtgctcacggccacgttgcgcggcctcggcaccttatgggtcgccggctcatgggacaaggcggaggcggccaagcattgccgcgtcacctctggccaggagctgtatctcggtgtggtgatcgggcatccgaagaatcatctggattatcaggcgaaatcctatgaggagctatgcgaagcgcaacgcacgcaccgcgccaccaagacctttgagcagttcaccgccacaatgagcgatgaggggcgcgaggccgctccggattggttcaagtccggcgtcgaggctgcgatgaaggcgccgagcgcgatgaaccgtcagccaatcaccttctcgtataatccggccgacgataccgccgccgcgcatatcgatcagagtgcgggagatgagcatcacgcgttcaatgacatgggcatcgccaagctgcacttccagatcggtgccggccaaggccagtgggcttggggcgacggtggcctgttcattcataagtaacctgtagtgacccccctcatagaggggagccactactacggctacttcagcgacggcatgggcttccaggtggggtcgtgcatcagcttgcgcgagtcccaccagcccttggcaatctgcaccaaaccggtcttgaggtgctcgcgatccaccatcaccaggcggatgacttccttggccgcggtgagcacggtacccagtccaaacaccagcggacggaagtcaccataggtcatgaagtaccgggccatgtatccgcggttgcgcatgatgtgataccggttcatgtcggatgtggagttgagctggcgcacgccggcgatatcccaattgccgatttcgcgcgtacggcgcaggatcacgtcgggcaccacaatcgggttggtgaccttgctggcgcggtagccatacatcgtgtcatcccagtagatgaagaagcgcgggtccggcagaccgatttccgtaaccacacggcggttgaacaggccgccttcgaagcacagcgtgtccatcactcggtatccggccgggccgaatgcggcgggcgcaatcgggttcgggatgcccagcggcacaatgaagtcgtactgccagtagaacgggccgccatcgtagtcgaatcgggagccctgaatcacctcgtgcttgtcggtccacttggacagcttggcaatggcgtccggcagcacggccacatcgtcatccatcacccagaaccatgcggcacccagctcgtaggctttggccacgccggcggagaaaccgcccgcaccacccaggttctcggtctgcggcgcatagaccacacgctcttcgttaccggactggtcggccacggtggtgccccattggccggtcaccttgccggcaaacgcagcgaccatgtccgccgtctgatcggactgctcattgtccacgatgacaatgcgccacggtgcctgttcaagcgccagaatcgaatcgaacagtgtctcaagcaactgctgacgtttgtaggtggtgacgatcagggcaagcttgtcgatgatgttgttgggtttcttcacttcagccatggctcccattgttgcacttgaccggcacaagacgaatttctgcacagtgaaacgcgggttgcatacgtccggcgcatggcgtatgaataagcctgtcagtttcagggaaggtgcaattccttactggcggtaacctgcaccccgggtttcataacggggatggtaggaagcccgcgacccgcgcaagcggctgatccggtgagattccggagccaacggtatagtccggatggaagaaacgagggctcattatgagtgtatcttcgcgtattcgcatgcaagttgttcgttctgtggcacccgaggccgagggttcggccagcacgtccaccgccagcaccagcgccaaacttggctcacacaccactggtgtggccgattctggccgctggtccacgcgccgtatcgccatgtatgcactgttcgtggcgctggcgatggtcaccagcttcattgaattcccgattacgccggtcacttggctgaagtacgacccgtccggcatcgtctgcctgattgccggctttgcgtatggcccggccgccgccgcaatcgtgtctgtgctcggctttgtgccgcacatgttcgccaatccgtggggttcgctgatggctgtgctggtggcgctgttcctgtctgtgccggccgcgttcatctaccgtaagatccgtacgcgcaagggtgccgccatcggcattctggtgggtgcggtgctggccatcgtggtggcgctggtgagcaacctgattgtcacgccgatttacgcgcacatgacctaccaagctgtggccgcgatgattctgccgattctgctgccgttcaacgtggctaagatggcgattcacgccgtgatcaccttcctgatctacaagccgatctccaacctgctgtccaagcagcagtgactggcctgagacgggccgatgcccgccacgactaacgaccactcaaagaccactcaaagaaccggaacgcagaatcccggcacgggccgggattctgcgttttcgcctatcagttacggattgctgtttcatgaccgttgcaccccattccttcgacgccgacgagttccacgattctgccgaacctcacgcttccgccgagcctgcctcccccgccgccgtgctcaaggacattcgtttcagctatgaccgcggcacctcatgggctttggatggcgtttcactcacggtccatgccggcgagcgcctatgcttggtcggtccgaacgggtcgggcaaatccacgttagcccgtctgattgcgggattgaccgcgccggacggtggcgaagtgacgctactggaacagcgcgtgtacgcagccggcccgaatgccgacgcctatcgcgctgcccgccgcggcatcggtatggtgttccagaatcccgaggatcagctggtcaccaccgtgttggaggatgacgtggcctttggcccggagaatctcgggctggagcgcgagctcatcggcgagcgcatcgttgattcattgcaggccgtggggtcggcgaacttacgccagtccgacccgacccgtatgagcggcggacagcagcaacgcgcctccatcgccggcatgctggccatgaacccggcgatgctggtattggacgaaccgaccgccatgctggacgaatccgcacgcgccgaagttatgcgcattttggatgatttgcaggcgcgcggcaccactattgtgcatgtcacgcatcatccagatgaaaccgttcatgccgatcgcatcgtgcacatggaggccgggcgaatcattggtatcactgcaaccgccgataatcgacccccgctagcggaggctgtctcgcaaagcgagactgagggtagtatcggcacagaagccgcccccagtcgccctacgaacgacagcccccgccagcgggagcgcgaagacggctccgaactgccgctgctctccgatggcatcggtgatatgacgaaccccattattcgcgtctcgcatctgacctatcgctatccttcggccaaacgggcggttatcgatgacctgtcgttcaccatcgcgcgcggtgaaaccgtggcactgatgggcgtgaacggttcgggcaagtcgacgctggtgcgcatgctgtgcgcgctggccgcgccgaccgccggcagcatcgaggcggccggtgttccggtggcctcgaccggcaagcgcggtcgcaacgtgcgcccgaagtcggcgaatcgcaagcaattagcgcaattgcgccggcatgtgggttacgtgatgcagcatccggagcaccagttgttcgcggacacggtggccgaggacgtggcgtacggcccgcgcaaccaggggcttgccgaggccgaggtggccgaccgtgtgcgcgaatcactggaactgctgcatatcgggcatcttgccgaccgctcccccttcgacctgtccggcgggcaacaacgattggcagccattgccggcgtgctggcttgcaatcctgacgtgctcatcatggacgagccgaccgcgagtctggacgcccaagccaagaagcgtatccatgagctgttgcgcacgctcaaatcgcgtggcgtgaccgtgctcatcatcacccatgaccgggaggaggccgagcaaatcgccgaccgcgtggtccgtatgccgattgccgcccccgcatccggcggccccgtcacggccaccgtcaccgagccggccgtatcctccaacggccctgcgcactcagtgatacaccgacttgacccgcgcgtgaagatggtgggcttcctggccgccatgttcacgatgttcgcggtgaacacgccaacccagctcgcgctgggcatcgccatcaccctggccgttatcgcggcggcacgcctgaacccgttacgggtgcttgaatccattcatccgattctgatcctgctggtgctgatgggcgtggtcaatctgtttgtggtacgcaccggcacgccggtggtggcgcttggcccgctaagcatcaccgatcagggcgtgaccatagccgtgctgtacgcctgccgtttcgcattggtaatcattctgggcgcggtgttcctcactaccaccacgcctaccgccatgaccgacgccttcgccaccttgatcagtccgctcaaccggctcggtatccatgcccaagaaatcgcgctggtcatgagtctggcattgcgattcattccaacgctgaccgacgaaacccgcgccatcgtcgacgcccaatccgcgcgtggcggttccatcgaaaccggttcactggcccagcgcatcaaggcgatgagcgcgattatcgtgccgattttcgccggcacgttgcgtcacgcggacaacctgagcctcgcacttgacgcccgctgctacgaggagggcatccgccgcacccactggcgtgccctgaccatcgccgcgcgagatctcatattcgccgctgccgtcatcatctacatcgcggccatcatcgcgctgtagggcggcaaacagcgcagacagcaccggttgctatgctggtgtggttatacgaaagatgtaaggaaattcccatggcattgaccaagaagcaaatcaagcagctgcgcgcgatggcgaactcgctgaagcccctgttctatgtgggcaagaacgatttgaccgagttggccgtcaatcaggccgatgagaccattgagaagcacgagctcatcaagtgcgccgtgcaggacggttctggcctgaccgccaaggaagccgccgccgagcttgccgagcagctgaacgccgaagtggtgcagtccatcggcaatcgtttcgtgctgttccgtcgctcccggcgcgacgatgtggagcatatccgcttggtgcgcgagtaatgttcgccccgctcgaccccgtagcttgatatgagtaatggcggttggaatcagtccgattccaaccgccattactcatattcgcccagcgagcaccgtcactgatccaagatggacccgacgattcccgcaacaatggtcaggaccaaggaccccagtaccgaccaccagaaaccgtgtacgaagacgcccacgccgaacagactgaccgccagccagctggcgagtcgcatgaacagccaattgataatcaaggtgaccagcccgagagacagaatcgcaaacggcagtgcgatcagatgcacaatcggcttgattgacgcattaatcagcgccatgaacaaagcgaacgcggcgatgccgagaatcggaggctcccccaccggggtcatgccgggagtcaccgcgaccatgacggcggcggcgatagtcataatcaaccagctggtcaggaaacttctcatggcccaatcgtagcgcggcaggttttactattgggcaaaacatgagatgatgttgtgcagaaacggtaagaaggtattgccgttcccgattgagaggggactgacccgcatgactgataatcaacaacaaccgtacggttcggacagtgttccgcagccggcacagcccgcacagccggcacaaccgtcttacggccaagatgccgcacagcagccgcagggctatggcgccccacagcccgccgcatacgctcaacccgccgccggaagctacggccagcagcaaccgcaatacggccagcccgccggcgcatacgctcagccgcagtacggccagccgcagtacggccagcccgcacagcccgcagcgggctacggccagcagcccggctatggacaggcttaccagcagccgaacgcctacgcgcagccgcaatacaccgccgctccgtatgccgccgccccggtggggcaatcgtccaagtccaagctggctgccggcctgttgggcatcttcctcggcggacttggtgtgcacaacttctatctcggcaacaccggcaaggccgtggcccaactgctgctgacgcttgtcggctggattctgctcggacttggcccaatcgcagccgccatctggggctttgttgaaggcatcatcattctgtgcagcaagcccggctcaccgtggcataaagacgccaacggctacgaactatcagactgaaactaacctcgggccacgttcattgggcccctgatcaaccacgcctctgcaggtatcatctcgatgccgcagtcgcagcgggatgcgacacgccggccgtgtacatgagttcatgtacacggccgttttctttgttgctttcaccctcaaaacaaacatttatcatgttcacttttgcaagatatgaacatcagacatcacagactaccataacttcccaattgcattaccaatagattaataaccggcaaaacggcttatatccgccatttttcatgctaggctttgaaaccagcacatcaacaaagtgcacaatccttttctacagagaaggtaacatgttgttcaattcatatgtgaatcgaacaatgccagtacttccctaggtgcttgcttggggaacgccatgctgaaaggaacacattatggcggagggaaaagtcatcatcgtcaacccggatatgttcggcaaggacccggattcgaaaacaaccaaggccaatgaagtggccaagagcttcggcctgagcgacgcggcgttggccgaggtcgaggacttcaaggcacaactcaccaaacacaacgcctgggatctgccgttcatgggatacgtcaacgaggatggctacggttacgcctacgtgcccggtgccgccgtggtgtacgacccgtactgggacgcccaccaagcattcctggcgctgcctaaggacgtgcagaccgcattcgccattcgtatgctgttcacgcaccgtccggtcgaccgctatggcgccagcatgttcctgcattaccagcgtggcttcaacgtgaagttcgagggtatcggcgcgaaccagtactgattggtactgactatcaaccatctttttcggattgcccgataaggggcgtataacaacggtgttatacgccccttatctgtattcagtgtcaggcgatggccgcccgccgcccgatacaggcgaatcagtatcgcacgagattcaacagttcctgctgtttggcatagcgggaaacgttggtcagggcgatgcggatgatgtgttcggaagtcttttccaaatgattgccgccggccacatgcggggtgatcaggcaatgcggctcatcccacaacggactttccgccggcaacggctcaggctcggtgacgtccaatccggcaccgtggagccgtccattgtgcaaggcgtcagccaaggcctcgggatcgatggcgtcgccacgcccggcattaatcacgatggctgtggatttcagacgacccagacgatccgcattcagcagatgatgggtctgcggcgagcgcggcaccgccatcgccaccacgtctgccaatggcaacagcgtctccagccgctcgaagccatacatcttttcaatgcccttggccggcacgtccgcatgacggcgcacgccgaaagtacgcatacctacggattgggcaagctgagcgaaatgcgacccgatgtcaccgacgccgataatcagcgcgatgccaccttccgggctcaataccggtccttcatcctgccactgatgatcacgctgattggaggcataccggttgaggttcttcatcaatgcccacatggtggcgaacatgtgttccgacacgctttggccatacgcgccgctcgcattggtgaccatggtgccgcgaggcagcacacccgggcagatgtacgcatccacaccggcgctgaaggtctgcaaccattcaagacgggtgtattgagcggcctgcgagaccgggaagttgccgatgactgcggtagcttgggaacgaagctcctcgggaacagcggccgaccataccatgtcgccgcggtgcgcttcgacgcccacgaattcctgcggcacatcgcgagccgccttggcgaaagcccgccgttctccttcgttgagtggcaggcagttgacaatcagcttatgcgtgttctcaatacccatggttcaccaaactaggcggcagggcagatattatcgcggtttcctcatgctgaaccaatgccgaactgctaccggaccaatgccgaatccgccccatcaaaccccaccaaaccaagggacaacccattgcgcatcgaccgtagcgtccgccccgaaccgtacactcacaggtggttttgtgattccatagcgtgcaaccaaggcagtacgattgccggtttatccgcacgcacaggtacctacgccggttggtaaaccttacattccataccttgcaaccgaacgtttaggagcatgtatgcctgagcagcatattgataacgagaagattcccacacgtcttatcggcgcgattgtggctgtcggctcacttgccttcattggcattctgaccgaaaccgtgatgaccgtgcttttccccgcactgatgcgcgaattccatgtcgacacggccactgtgcaatggattaccacgatttatctgttggcggtggccgctaccatgcccatcagctcgtttttgaagcgccgattcgcgctgaaaaccatttttcttgcggctgtgattctggccatcgttggctcgctgatcatgatcgtcgcccaagccttcccgctgctgattgtcgcccgcattattcagggcattggctcaggcgtggccacgccgttgatgatcaacatcattctggagcagtctcctcgttcgaaaatcggccgattgatgggcgtaggatcgctggtcattaccgtggctccggccatcggcccgaccgtcggcggcgcggtgaccacagtgctaccgtggcgcgcgattttcgtcatcgccattccgctggtgctaatcgcagcatgcatcggcatgaagtgcattgagcagaagacaccgaccgaggctgcctatcttgacccgattcagcttgggtccattgttgtcgcgctggtcggtctggtgctggcgctcaaccaaggtggcgtggccatcagtgcggcggtgtccggcaagtcagccacacgctccggcattatcgccattgtcagtctgattgtgggcctcgccttgttgatcgtgttcgccatgagttccaagcgtgccttctccccgctgctgcgccttggcattctcaaggatcccgccgtactgttacacgcctgcgcatatctgctgctgccattggtcgccatcggctacggctatgtcatcaccaatgtggcacagctctcgctcggcaccacggcatttgtggccggctctctggtgctgcccggcgcactggtcggcgctgtctgtgccccgcttggcggctggttctacgataagttcggcgcggtcaagccgattctgattccgctcggcatcgctattttgggcccagtgcttatgctggtgttctcgatgcagcttacgcccgtgctgctcgccggattctatttcattttcggtctgttctattccatcggcaatgcgaatgtgatgaccagtggcctgtcggaggtctctcccgagttcaagccggacggcaacgccattttcaacacgtgtcttcagtttggcggcgctgccggtaccgcactgttctccacgattctttccgtggctcaggccggcgcaggagaagaaggcaccgctgagtttgctcacgccactgccgtcggcggcacatggacgtttgcaacgatgacggttatctgcctgattggctggtgctgtctggccaccgcgttccgcattcgcgcggcacgtaagcgtgcataaatctgattaccaatagagtcccagctttccaaacacgtgtggggcgtgccccgggagaatcccgggtcacgccccacacgctaatgaaaggaagaaaaggagaaagaaagctttggcgggcagtgccggctgctgtgaccttgccatcacagcagccgggctgatcccgactattcagttatggtgtgtatcgtattcggtgcggagaccgagcgggcaagcccgctattttttatctccgccgaccgccatcaccgcgcgctgaagcacaacgaagacgaggatcatgagaccgataacgatggtggtccattcggccggcacaccgaagtcagaggtgagcggatcgaggatggagcgaaccagagagccgagcacggagccgagcacgtagccgaagccaccggtgatgatcgtaccgccgatgaccacggaggcaacggcgtcgagctcccagccaacacccacggtgttcttggcagagccgatgtttgcggtgtacacgatcgaggccagggcggcgagagtcgcagaggtcaagtagatgatgtactgcgtgcgcttgaccggcagacccataagttccgcggaggaacgggagccgccgatggcgtagatggtgcgtccggtgcgggtatggtgcaggaaaacgtagccgaagaccacaaccaccagtgcgatgatcacgccgacgttgaaggacagatcgttggagatcttcggattgtcgatgatcttgatcgcgttggagatgaacgagaagtcattgccctgcgggaaggtcagcgagtcggtggagatgatggaggcaagaccacgggccaggaacatcgtcgacagggtcgcgatgaacggctgcatgttgaattcctcgatcaaggtgccggccagcaggccgaacacagcgccgatgagcagcatgatgatcatgaccaggaaggcgggcacgccggcgttcgtcagcttcaggccgacgactgcggtgatggccacgatagcaccgacagacaaatcgataccaccggtcagaatcggcagggtcatggccacagccagaataatcaggtaggcgtggtcaatgaacagggaggagatgaagcccagtcgaatgtaggtgccgaacaacgcctgacccatgatgatcatcaggatgaagatcaccacggccgcgagggtcgggatcatctgacgatcgagcttgaagcccttcttgggagccttcactttgtttgccgtagctgttgtcatgctgccaccgccttagcttgagccttgagcgcgcgcttgcgtttcatattcgcgctcaggttgtgaatcttcggagcctgcatcacgcagatcacaatcacaacgacggcgaagaaggccggagttgcctcggcgttgacgcccagggtgatgatggtcttgcggatcatggcgataattacagcaccgacagcagagccggcgagggagaacttaccacccagcagtgaagtaccgccgatgacgactgccagaatggcgtacatttcgaggtcctgaccggtcttaaccacgtcgacacgcatcacggatgcggtggcgaacagaccagcgatggccgcgaggaagccggaaatcgcgtagacgaggaagaggatcttcttcggcttgataccggtcatacgggaggcttcctggttgatgcccacggcctcaatcatcatgcccatagcggtcttgcggcacagcaggccaacgagaatcacaatgataacggcgatgacgaagttggcgggaatgcccagaatgaagccgttggcgaaccacttcagaggttcgttgccagcaactgcggaggcgtcggtgttctcaccggaggtgatgaccttggccataccacggccggcgagcatcataatcagggtggtgatgaacggctgtaggcccaggaaggaaaccagagcgccgttgacgcagccaatggccagaccaacagccaaggcgatgaggatggagagccacacgttcatgccattggacagggtctgcatggcggcggcacctgccactgccataacggaaccgaccgaaaggtcgataccggcggtggagataaccaaggtcataccggttgcaatcatcaggtatcgggcagattcctggagcatggtgatcagcgggccggccagaccaccggtgttgctgttccagctcagagccaggaagtcatgctggaagatggtgcagatgatgaccagaagaatgaatgcgacgatcgaccaggtcaggttgctgctcagcagcttcttgacaaagttgttgccctcggcttttgccttttcagccatctcatgcctcctttccggtgtttacgttggtgttagcgatggtttcgacgatggtcgcctgagagacggtgtcgtcgttttcgatttctgcgatcttgtggcggtccttgagaacctcgatgtcgtcggacagacgcacgacctcttcaagctcggaggagatgaagacaacgcccatgccctgagaggccaggtcaagcacgacctgctgaatttcagccttggcaccgatatcgataccacgggtcggctcgtccagaatcagcagctcggggtgcgtggccagccaacggccaataagcaccttctgctggttgccgccggagagattcttgaccgggcgatccgggtcggcgggacgaacgttgagttccttcatgtacttgtcaacgatggcgtccgcttccttcttgggaatcggcttgaacataccgcgcgttgcctgcagggcgataaggatgttctggcggaccgtcaggtcgccgatgatgccctcatcacgacggttttcggtggaatacgcgatcttgttcttcaaagccgtgtacggatcggagatgttgaccttcttgccgttgagcgtgtaggtacccgaatccggcttgtcggcaccatacaggagtcgaccaagctcggtacgaccggagcccagcaggccagcgaagccaacgacctcacccttgtagatgtcaacatcaaccgggttgatggtgcccttcttgccgaggcccttgacatcgacgatcggcttctcgccgggggtgatttcacggcgagccttcttggcaccaatctgggacagctcggcggcggacttaccaatcatcatgccgatgagttcgtcgcgcggggtgtccttggtcatgacctccttgatgaactggccgttacgcagaatggtcagacgatcggtgatctcataaatctgatcgaggaagtgggagacgaagaggatggccacgcccgagtcacgcaccttgcgcatgatcgcgaacaggtccttgacctcgttggcatccagcgaagaggtcggctcatcgagaatcagcaccttggcgttgatgaccatagcgcgggcgatggcgaccagctgctgcatagcgatggagatggagctcagcggagtgtgcgggtcaatggattcgaggcccatctgtgccaaatacttcttggcggcctcgtgggtcttcttccagtcgatgccgaaggggccgcgcttttcgtggcccagcatcacgttctcaccgacggaaaggttggtgcacaggttcacttcctgatacacggtggcgataccggcgttttgtgcgtcgagggtgccgttgaactgctgaggcttgccgtccaccataatggagccggcgttgatcttgtacacaccggtcagagccttaatcatggtggacttgcctgcaccgttctcacccatcagggcgtgaacttcgcccgggtagagagtcaaatcaacaccatccaaggccttgacgcccgggaattcaatcgtaatgcctttcattacgacgatggggtttttatctgtcatgtctttgccttaaacgagaatgaagtgttatcgttttgtgatatttgagccacacatgagtgatggtgtggaaggaacatccttctcacaccatcacatcaattatttggttcagttatcaatgagtcgcagcagacttatcagtaggcgcgggtgttgttgtccagagcttccttggcggaggcggcgtcgaaggtcttggactcgatctcgatgtccttctcaacggtcttgccatccaggtagtccttgacggcctgagcggtttccttgccgaaaatcgggttgtactcgatcacgtaggagaggtcgccatcaacaagagcctgcagagcgttcttggtaccgtcgatggtgatgatcttgaccttgcccttgaggccggcggcgtcaacagcctgagcggcaccgaggcccatctcgtcgttctgagcgaagatgaactgcgggttgtcggacttgtacttgtcgagcagaccagcggtcacggtcttggcctcatcagtggaccagttagcggactgggactcaagaaccttgacgttggaggcaaccttgttgccccaaccagtgccacgatccttcaccacggacaggccggcagggccttcgaggatgaagccgttggcgccatccgggaagttcttgttcacgaactcggcagcctgctcgccgcaccagacgttggacggtccgatgtgagcaacgatggccttcttggcctcggcgtccttgacgtccacgttacggtcaacggtgaagaccggaatctcagcctcagcggccttcttcagggagtcatcccaaccggaatcctcggtggaggacaggatgatggcgtcgacttcgtcgttaacgaacttgttgaacgcctgaatctgcttctgctgatcgttgttctgggtcggagagtaggtcaggtcaaagccggcatcctcgaatgccttctgaatgtccttctcgttggcggtacggaagccgccctcaggaccgacagccacgaagccaaccgtcttcttgccggagtccgagctgccacctgcgttgctggaaccgcatgcggcaacgctgacaagcgcagcagcagaagcaacgagggcaatggccttcttccaattcttcataaatactcctcctcgagcagtgtttattttttggatgatctttcatcctgtttggtgactgttcgtcatcgacagcctctagtatgacgctcacaggccaaatgttcaatcgcatgcgataacagtttgataacaggtttataacaaattaataacagtggttcaaaaatggcgtcgcaacactgttttgccttgataacagaccaataatagtgattggttgcgcagcggcaatgccgctcgccagccgagcgacaaagccgttgcctcatacaacaagaaaggttattatgaacaccgtttttcttataccatctactgcgcaccgagggcagtgacctggctatcggcgatggtccaggaaccgtcgagtgagccagaaacggagcgaacaatacccaaatcgtccacaatggccaggcgacgggacaggctaatctgccccgatgccatcgacgttatggttccattaggcagacgctgcgcattggccgggcctggtgccatttgacgccatgcctcttgttgttcgctgtttccctcaggaggtgtggtggcgtacaccagattcagatcgttgtagaacgtgagcatggtgacgtgtctgagcacactcacttgggtggccgctttgctcagaccgctcagtgttttatcaccgttgcgcgccacaccggtcatcatcacgccgttcgtgtcctcgccctcgactgccaacgccaatcggcacccttccggagaaaccgccaatgccacaatgctgtcggcagcgccaagccaatcaagcttcagatcggtttccttacccccatctgacacatgcaattcgcgcccgttctcggatacagcccatacttcgccatccagaccttcggtaatcgatcgcatcgactcgccggagaacatcaccccacaggacgcaccatcagatttcaggcattcgacgacaccgtccgcacgcaacaccgcaccgccggatgaggaaaaaacgaagccccgagcatcgtcatatccgggggcctcccctacacgcaacggactggagctggccagggaaacgatatgcccaccggtcaacgtgtatacgcccgctgtcggctgctcggtagtaagtttcacatttgcgtcggcatcagaatagtccactccgtcgccggtaatcttcagcgcgtattcggcattgccgtcgcccatagtcagacggatgcgatgtaccagcaggcctcgttcttcctcattcaacgcattgataccgctgttaaggtgtatctccaccacattgttcttcaccggcacgctgtcgaccgcgagtttgatggtaggcaagccggtgcctcgcagcactccttccaaccaggagggtgcatccgagagtacttcaccgactgcctgggtgcgccagttgcgccagctcagccatcgaacatccggtatgagctgtttgccggatgtgctcacctgatacacggatacttggcggaagacttgttcaaaatcggcggtggatatcaccacgccgttctccaacgaggagatgcgccactggccgcttcttttaatcaagatataaggaactttgctgatcgtgctgctatctgtcggcgtatacacgccatgcgagtccagagagccgaccacttggagctgtacttctacaatcagcgagctctccgccccttgcggggtactcatcgtattggcacggcggcggaaatccggcgtaccgctgtagaccagtgccgaggaatcgccattccatccggccgacgccgaaccggtcagaaactcacgggccacacggtagccatcggactgtacgccggcaggcatggcatcatagaaccctttgacgatggtttccggctgcgcatcgtccgcaggtccctgaggattggtgtaaacacgctgagtctgctgttccaccggtgccagagtctgcaccgagccgctaatcggcaaaccgaacggacttgagcatgccgtcatcgtgacgcaacagactatggccgcgcctgcggcggcaatcgttctggtcactcgtctcatagcggcctccccatcatcgtgtcgcggcgaacctcatgataatcatgtgtgacttggctggtggccacaccaaacccaccggtaatacgcaggtcatcgggcgtttcagaagcaaaattcaccggcagttcagcgtccgccacctcaccttggtcggggtcacgcggcagcaataccaagaaccaggtgccctcccccactgccgaacgtacacggatagtaccgtggtgcagcaaggcatcagtcatggcgatggccaggcccaatccggtgccgccggtaacgcgtgaacgtgaaaggtcgcctctccagaatcgatcgaatacatgagcgactttgtcttcgtcgataccaacgccatagtcgcgaacgctgatggccacggctttgcggttggccgcgacgcgcacttcgatcggccggtcctcagcgaaatcgacggcattggccaacagatttctgacgatgcgaatcactcgacgcgaatcgatacgagtcaaaacctgcacattgggcaaatacgtgtgaatcggcacccgtttggcttgggctatgccgtcaacttggtccactgccgtttcaattggttcgcataaatcggtttccacaaggtcgagtgccgcataaccggcatcgtagcgggagatttccaacagatcggcgagcatgtcttggaatcgactgatctggccggccaacagttcgaccgtacgcttggtggaggggtcgaagccgtcttttttcatttcgagcaggtcggaagccatacgcatggtggtcaccggggtacgcaattcatgactgacgtcggacacaaatcgtttctggaaaacgcttgcttcctccagctcatcgatcttctggttgagcgcatcagccatcgtattgaaggattgctgcagcacaccaagctcatccttacgatccacggtaacgcgcatatcgagattgccggaggccagtgtttccgaggccgctgccactcgttcaatcgggcgcacgatgccacgaatcaccagccagattactacgcccgccacgatggacagcaacgcacagatgaccaccagactgagctgaatctgcgtcaaggactgctgctggaacgtgtacgaataaatggcgaagaattcgaggttgccggccacgccaaagtccaatacggtgccgagcaccgctgcgggcgtcccgctgcccggcatgccggaatcaccgggaatttcgaccggctgatagaacatgctgtcatccaagtcggaggccatggacgaacggatgtcatcagaaatcagactttgatagctgggttcggtggatacggggatgatggcacgcgagttggtatcacgactccacaaatacacacctatcaggttggagggcccctcggattgcaacgaggacgccaagtcattgaccagctgctggatctgcactgtggcggagacatcggccgcgtccagactggtttgggcctgctgcaccatgtttgaatagtcggcacgcgactgcgaagtgatttgggtaagcagcgaggcgcgcactgataccatcgatacgccagagaagacgatggccacggccagtgtaagaatcacggtgagggccacggtgcgggcctgcagcgagcgacgaacttcagcgcgtccgtggcgcagcaagcgtttgaggctgaatcgagggcgcaggttcattgttcaggagtgacgaacttgtagccgatgccacgtacggtctgcacgatttgcgggttctcggggtcgtcctccactttggccctaaggcgttgaacatgcacattgaccaggcgcgtatcgccggaattctcgtatccccagacattcttgagcaggctggaacgactgatggcctcgccggcggcggccgcaagcatgaacagcagctcgaattccatcggagtaagattcaggtccttgccatccttggtggcggtgtgttccaaacggtcgatgacgatggatccgcgttccagatggttgacgtttgcattgccaccgcttgcgccaccggtggcaccgtcttcggcggccggcttggcgatgcggaagcgtgcatggatacgcgccagcaattcggccactttgaagggcttgggcacgtagtcgtcggccccggcttccaagccggccacgacgtcaagtgtgtctgatttggcggtgagcatgataatcggcacattagaggtagctctgatgcggcgggccacccccgtgccgtccagcccggggagcataacgtcaagcagaatcaaatcgggcttgacgatggggaacatttccacagccctcagcccgtccaggcaggtcacggtctggaatccctcgttttccaaaacaagactaagcatttcgccgatggcctgatcgtcgtccacgatgaagatggtcgccatggtgtttgtcttccctttcccactgttattgttgcgttacactttactcccctatgttcatttctgttcgggttccccgccatgcaacatcgggcgaatcttggcaagacgctggctgacttcgtgttcatagccgcgatcgttgggatggtagtactcggtgccacgcagctcttcgggcatatattcctgtggcgccacggcaccgggccaatcgtgcgcatacttgtagccctcgtggttgccccactctttcataagcttggtgggggcgttcctcaaatacagcggaacagcgccgatcttgccggcatccacgtccgcgagcgcctggttaatggcgttatagctggcatttgatttgggcgcggtggtcacggcaatcgtggcttcggccaaaataatacgtgcctcgggcatgccgaccagcgccacggcctgcgccgcagccacggtgacctgcaaaatctgcggggcggccatgccgacttcctcgctggcggcgatcatgatgcgacgggcgatgaagcgcggatcttcacccgctttcagcatgcgcgccagataatggatggcggcatccggatcggagccccgcatggatttgatgaatgcggaaatcacgtcgtaatggtcatcgccgtctttgtcgtagcgcacggtggcggtgtccattaccgtagccacgatttcggaggtgatgatgggtcggcgtgcgccctttttgcgggcttcgtcgccggtgaccgcgccagccgcggcctccagaatcgtgagactcttgcgtgcgtcgccaccggccatgcgcacgatatcggcgatggcttcgtccgtggctttgacctcgtccctgagaccgcggtcatcagtcagcgcgcgctgcaccagttcggtgagctgatcaggctccaatgactcaagcttgacgaccaccgaacgggagagcaacggtttgatgatggaaaagctcgggttctcggtggtggcgccgataaaggtcacgtcgcggttttcgacggcgggaagcagcgcatcctgctgggatttggagaagcgatgcacctcgtcgatgaacagtacggtttcccggccgcgtgacacgagccgttcgtgagcgcgggtgagtacgtcgcgcacgtctttgacgccggaggtcacggcggagagttcctcaaacacgcggccggattggccggccacgatggtggcgagcgtggtcttgccgacgcctggagggccgaacaggattacggagctcggcgcggtgagactgcctttgctggccggattggcgaggcggcgcagcggcgagccctggcccaacacctgcgtttggccaatcacctcgtccaaagtgcgtggacgcatgcgcaccgccaacggccgtgtcatcgactccggcgcatcagccgccccaaacaaatcgttctcactcataacgtcctatagtaccccagtgttcgaacagacgttcgagccgcaccttggcttccctcagagaggggagccgaggaatcagttactcaccttgtagtcgtggaagactacttcgccggtgtcttgggtggcgtcaaggtccacgatgccttcgatggcccagtcgtggtcgccatcggaatcatcgataatctgacgcaccttccacgtatgctcgtcgttctcgtgcttgtcatccaacatgaacagttcgggcgagcgcgcttcggcgccgatgcccacgtactcgtgctcgtcgtagtagtcgtcgagcacatcttcccattcgtgcacaccgtagccccagtctttgtcgagcgcgccgagcttgtccggctggtcgaggtccataagctgcacacggcggaacatggcgtttctgatcagcacgataaggcctcgtcggtcctcgaccaccgcgttcttcttgcccggcgccgccaaggaggccgccgcctcggactggtcggcggaatcgccggcgttctcccattcatccaccagcgaggagtcgatggagcgcacgagcacgcgcagccaggagatgatgtcttcgagttgctcgtcacgcttttcgggcggcacggtacgcgccagcgtgcggtaggcgtccgagaggtagcgcaacagggtaccttcggagcgggcgatgttgtatcgggtgatgtatccggtgaagtcggaggcggtttccaccatgtcgcgcaccacggatttcggcgatagccagtagtcgttggcccacggcacatcgtggcggtactggtcgaacgcggattcgagcatgtcttccagcggcttcggatacgtaatctcctgcagcttatccatacgctcgtcatagtcgagtccgtcagccttcatatcggccatcgccttgtctcgggcctgacgctcctgggcacgcagcacctgcttggggtcttcgagcgtggcctcggccatggaaatcacgtccagcgcataggtgtcggactcggggtccagcagttcgagcgcggccagcaggaacggggagagcggctggtcgagggcgaagtcgtccggcatatcaagggtcatgtagtagtccttgccgccgtccttgcggtcctcggtttcgatgacttcggtatcgaacagggtttggaaaatctcgtcggcccgctggtgcagatgctccttttggtcgggggtctgcgcggaatcgtcgatgagatcgtcgatacgggcacgggcgtcgccgccctgcgccacttcgttgagcaccatcgaatgcgtgattttcaggtgcgggaccagggtttccggttcggcgtcgatgagcttgtcaaacgtgctctggttccaggtcacaaaaccttccggagccttcttgcgcttgaccttcttgagcttcttcgggtctcccccggccttggcgatggccttctggttttcgatttcgtattcgggagcctcggcgatcaccagtccctcggtatcgaatcccatacgaccggctcgtccggcaatctggtggaattcacgggcgcgcaggcggcgcatcttggtgccgtcgaacttggtcagggccgtgagcaccacggagtgaatcggcacattgatgccgacgcccaatgtatcggtgccgcaaatcacgggcagcagaccctgctgggcgagctgctcgaccaggcggcggtagcgaggcagcatgccggcatgatggatgccgacaccggtgcgcagcagtcgctgcagaatcttgccgaaggctgtggtgaacttgacgcctttgatggcttctgcgatggcttggcgctgttccttgctggatacaccggtggaggcgagcgcttgcgcggtctccaatgcggcgtcctgcgaaaagtggaccacgtaaatcggggtttcgccgttgcggaaggcgagttccacggttttttccatcggatcgagcgtgtattcgtagcttaacggcaccggtcgcggcgcgtcggcgattacatccacgtccggggtgtcgttcagatcggagagcttgtcggcaatggcgtccacattgccgagcgtggcgctcatcagcaggaactgggtctgcggcagcgtgagcagtggcacctgccacgcccaaccgcgctccggatcaccgtaataatggaattcgtccatcgccacgaggcccacgtcggcatgggtgccttcgcgcaaagcctgattggcgaggatttcggcggtgcagcagatgatcggcgcgtccgcgttgatgtggctgtcgccggtgatcatgccgacgttgtcgcggccgaacacttcgaccaagtcgaagaatttctccgacaccagcgccttgatcggagcggtgtaataggagcggcggccagtgcacagggcggcgaagtgcatgccgagcgccaccagcgatttgcccgaaccggtcggggtattcaaaatcacatggtcgccggccaagaggtccataatggcctcttcctgatgcggccacggctcgatgcccttgacgtcttccacccagccgaagaatcgttcgtagatgtcatcggccgtaagattccgttcacgctcgtcaccgtcccattcgggggccagccgccccagggatccgtattccttctcgtcagtcataatgctcagtctacccagtggcctattccggcggcacgagccaccctccgtcgctatgcgacgcctcccgccagcgggcggagccgtgcgaagagccgtgccatgcgcttggctccgccagtgggaggatcgctcacgccaaccggcggcgcacctcgtcggggtccacctcgggttcgaggggcggccaggtcatgttcatgttcttcaaggtggtgcgcagcagttcggagaccactgctcgcgaataccagcggttatcggccggtacgaggtaccaaggtgcggcggccgtgctggttttctcgaacacctcctgccaagcgaacatgtactcatcccatcggtcgcgggcctcgagatcggagatgtcgaatttccagaacttggtgggatcgtccagtctcccgaggaagtgttttttctgttcttcctggcttaccacgaggaagatcttgaggatggcgcatccgctggcggccagttcacgttcgaaatcgttgatctggtcgtagcgggcacgccatacgtcttcgggataggtgccatagacgtgcggcatgaccacatcttcataatgggaacggtcgaatacggcaatccaccccgccttgggcacttcacgcttcacgcgccagaggaagtcgtggtcgagctcctcggccgcaggcttgccgaagccatggtaatggatgcccatcgggtcaccttggctgaacacgtgacgcacgatgccgcccttgccggaggcatccatgccttgcagcacgatgagcagccgccgtgtcgagcctttgacgccattcgcgtacatgagccgctggtatcgggcgatttcggaggagctgatcgaaatgaactcctcggcgtcctctttattgccgtcgaatccgggagtggaatcgccttcgacatcagtgacctgcatgccgtggtggaacataagacgttgagcgggcggcaacgaccatacggcgctgagcagttcactggatttcgccgcacgtgccagtcgttcaggcacgctggcactggagtcgatggtgtctatgcgatccgccgcgagctgtaataccttgtcgatccgtcgatcggttttgtattcctttcccttgccgttcttgttgttctttcctgaggattttccggctgtaccccacttgccggcctcttcaggcttgttggttctgtcgtcgtccttggccatgctcccgattgtacgtcttgtaactcaggagacccagcaacgtagcgacattcacattccacttgttactgcaaatctatagacatgcagtcgttcggaccgtaattgttggctttgcaccaattccaagcctcatccgtcgagtcgaagccctcaccggcaagaatcacatagtatttgtcggaattgctgctgtaggtgggccagtcacccgaccagataagcagtacgtttgacttcttgttgtgcatcgtgatgaattgcgcaagaatatcgtgatagttccaggtcttgccttcagcctccatacccttacgcttgctggacagctgcgcggtatacgtggaatagacccgaaaaatcgaacacggcatcggccacgacattatcgtcgctgtcctgcaacgtgagtcgggtggccgaatcattgaatttcgtggatgcgttcttatcatcacaattcgaagtggccagaatcgtgactatcagattggtcgctcttgatcgaggagactttcatatcgggagcggcatcgcaggttttggcaggctttgccttgtcggggtcgatgtatgccaccagatatccgccggctttgatgacggtgtccgtattcgttacttcgctggtgccgatggtgtagtgcttcttggctttcttgccgctgtcgtagatgccccagcccttcacgtcaacgtctgtggagccggtgttcttgagctcgacccaatcgcaacgcttgctatccgggtctccggcagctttcgtattgccggcatagacctcgttgatgattacggatggtttggcagccgtgttctgttcggcagtggcctgctgctcgtccgcagccgcagcgggcacgccgatcagggcgatgctgctcagtgtcaccgcagcggtgagcagcgcgactgaactttggctgaattactgctgaagctagttcttggatttgcgtcgaaccgtccgtattccgccgacaatcgcgattacagcggtaccgatagctacgctgatcaacgccggtcgttgcgcggcatggagggtggcgagatccggtccggccgcaatggcactgttttcacccgccgagctatccgacgccgggtgattgcccgcgtcggtgtactgggcattgaccacactcgggccggtaagcgccacttggtcggcggtctcgaccttggccacatcgccgtgcttatccaaggtgacgcgggcgcacagggctttggcccagttgatacgctgccagccgtcgctcgattgccatagggggtatccggaatccaaggcagtggctttcaaaatcgcgttgcgctgatcggcgtgcagttcgggataggccagtcgcagcacgtccgccgccccgcgcggtgccacgaaatcagcgccggactgggcggtgtcttgcgggaaggtgtaggtcaggcgtgcggtgtagacgcgcacggccgaggcctggtccgcgaccggctcggtggccaccgggtccagaaaatcgttggtgtagccgcccgaaccggaggccttggtgttggcgatgcaggcggcgagggtagtgccgtggccgtccgcggcgcagcgggacaccagatagtcccgcagctgccgggacgcgggcacgatggacgaagcgaattcgttatgccagtactgcccgttctgggcggatgcgccaatgcgcccgcccatgatgtcaagcggataatgcacgccgagcacgatgcggttgttgccggcctccgaagtgcgggccatgatttgcggcgcgagttcgggaatcatgccggccagcgcgataccccacgaataggcgccggtagtgtggccggaggggtaggaactgtttttctgcaagttcgagtagccgggcacgtgttcgagccatgagggtgattgcttgatgtcaagcgtggcgggcagtccggcgagatcgttagtgccgccgtagctgctttccgcacggttcagataggggcgcggatgcatggccgcacgttttgaagcgtaggtggaggccacgttaaaggagaagatatcggcgacggcgttgagtttcccggatttgagcccttcgctcatatatttgccaagcaccggaccgagcgcgtccggcatggcttcctcggcttgcagatcggagtcgacgagcgcacgcttgcgttgggcgttcaggccatccttatcgagattttcggcggctttgtggttaattgccacggccaaatcttcgtcgagtttcattgtatcggcgtcgagcaccttgccaccgtgttcggcatcggtgggggcctgccaatagttcttttcgtagtcggagagcaatgccacccaatccgggttgggcagctggtcggcctgtgcgattgcaggcgtcacggctagcgtggccgccaacgccagcggcgcaatggtcgcaatagcaaaaacggaggataggtgccggaacatcttcatatgttccaacctatcctccgtgaaggctacgtagccggagcccagtcaaacactcagtaaattcttcgtgccggcttagcggcgattgagctgactgtcaggcctctggcttgtcctcaggcttttgagactcctggaattcgccggtttccgggtcaacctgtgactcgggctgggtggcgtcatatccctgttcgtagcgggtgcgccgccagttgcgaatcgaggcgttggtgccacggtgatgcacatggtatttgcgcggcgtaccgcccagcggcagctcttcgacctccttggccacagcgatctggttgacattggacgggtcgccggcggcgatcggcgccagcggctcgggttcggcgggtgcggccgtacgctgctgcatgcgcgagggcagccattcggcgagcctcgacaacagccagcaggcgatgaagtaaatcaccgcggccatgaccagcgtctgcaggatgttgaagtacatcgagccgagtcggcgcgattcctgcagcaggtcggtatacatgatgatcgagcctagggcggtgtccttcaacaccacgaccagctgggtgacggcggccggcagcatggcgtagacggcctgcggcacctcgatctccatcagcgactgcgtttcggtcaggcccaaagcgagcgaggcctcacgctggccgcccggcagattgccgacgccggagcgcaccagttcggcgaccaccgaaccgttgtacagcaccaaggccagcaccacggcccaataggacgggctgggcaggcccgcgaacgcgaaccatcgccagaagaagatcatgagcagcagcacgggaaccgcacggcagaactcgacgatcacggcggagacgccacgtaccaacgggttcggcagcagtcggcccacgccgaacaccaagccgaacaccacggcacccaccacggccacgatggtggccttgatggtcatccacagtccgggcaggtagaagtcggtccacgcctctcgttcgacggcgggcttccacagctcccagctgagctggttctcgccgtccggcgggttgtgcaggcgcatgaggataagcacgagcaccaccgcgaacagaatgcccgcgatccagttgacgatgcgaatggtgcgccggcccttgggaccgggcgcgtcgaacagcacggaattcgaagtatcggccatatccgtcacctccttacggcgagtttgttggacaggtacgtggtgagcatgccgatggggatgatcaggatcacgtagccgagcgcgaagatcaggaagatttggatgatcacgtcgggacggaattcgatcatctcgctcatcagcgaggatgtttcggtggccacggatgcggcggcggccacggtggagttcttgagcagggcgatcagcgtgttgccgagcggtgccacggagcctcggaaggcctgcggcagaatgatctcggtggcggactgcatgaagcccaagcccagcgctcgtgcggcctcggcctggccaatcggcacggtgttgatgcccgaacgcagagattcgcacacgaacgccgccgtgtacaggctcaggccggtgaccgcgagccagaagaagttcgtggtgaaggtgtcggagaagctgagcttcagctgcgcgtaggcacccagcaccatgaacaccatgatgatggtcagcggcaggttcttgaacagttccacatacgcaccggccacggccctgagcgaggaaatcggcgagatgcgcatcaccacaaggatcacgccgaggatcagggagaacagggcggaccatagggtcagttcgatattgaccagaaacgcgccgagcacgtcatactggctgaagagttccaggaatccgctcatcaggcctcctctccttcgtccggggtgggcgggttgtagcgtacgtcgggcgtgtagttggtgcccttggtgttatcgctgatggcgttctcccacgagccgtcctgaatcatgtccacgatggcgttgttgattttggtggccagctgcgtgtcgcccttcttgatgcccacgccgtagtattcctgcgtgaacggtttgccgaccaccttgagcttgccgcgcgaggcggaggccaggccggccaggatgatgtcgtcggtggttaccgcgtccacgatgccggagaacagggcggtggcgcattcggcgtaaccgggctgttccatgagctggacttcggaggcgaacttctccttgacggtggcggccgaggtcgaaccggtgacggagcataggcgcttgccgttcaggtcttcggggccgttgatggagttgtcgtccttgcgcacgagcagatcctgtccggccacgaagtacgggccagcgaaggagacggccttcttgcgctcgtcggtgatggagtaggtggcgaggatcatgtccacgtcgccgttctgaatcatggcctcacgctgcttggagggggcttccttccatatgatctggtcttcggaatagccgagtttcttggcgacgtatttggccacgtccacgtcgaagcccacgtaggtgccggacttcttgaagcccaggccgggctggtcgaatttgatgccgatgcggatcttgccggtttcgtccgcgccgcaggcggccagcgacattgtgcaggccacggcggcgagcgcggcgatcacgcggcaaaccttccgtttgaacgtattggtgaatgtcattggattgcgtacccgtctttcagtgggttcgtcagtgggtgaggatcttcgagaggaagtccttggcacggtcggtctgcggatgctcgaagaactcgtcgggcgtgttctcttcgagaatctggccgtccgccatgaagacgatgcggtcggcggccttgcgcgcgaagcccatctcgtgggtcacgcagatcatcgtcatgccttcatgcgcgagttcgaccatcacgtcgagcacttcgttgaccatttccgggtcgagtgcggaggtgggctcgtcgaacagcatgaccttggggcgcatggcgagcgcgcgggcgatggccacacgctgctgctggccgccggagagctgggagggcatcttgctggcttgggagtcgacgcccacgcgggcgagcaggtccatggccagttgctcggcttccttcttgtccatgtgacgcaccttgatgagggccaacgtcacgttttcaagaatggttttgttggcgaacaggttgaacgactggaacaccatgccaacttcggccctgaggttcgcgagctccttgccttcctgtggcaggggcttgccgtcgatgcggatgtcgccggaatcgatggtctcgaggcgattgatggtgcggcacatcgtggacttgcctgagccggacgggcccacgaccaccagcacctcacccttggtgacggtcaggttgatgtccttcaggacgtgcaaagcaccgaagtgcttttcgacgtgggtcagttcgactagcggacggttcaggtcctctttgccgggaaccagcggggtcaatttggccttgcttggtgatgttgtgcttgtcgtgcgcgaacgcactgctgtttcattgttcgtttcagacatgagtgggaggatagcacaccgacgtttccaacgtgttcacagtatgtccacacagttgctcagtcgatgtctcatctccgcatcagacatcgtgaaggcggcattgggcatcggcatacattctcgctgagtcgcgcatcgctcggcgtctgctgtgcgctgattgcctgctgcgtggtggctgagacgttgctgcgacggcaaagcgggcacgtgttgtcctatctgctgattccatgtttggccttggtgtcgttggcgttgctgccgcgtatgccgcagtcgggcgcatggctggcggtcactttgtattgtgtggggctggtctcgccgtttcccatgtcgtattcgtataaatgtgctaggcattttgagcgtggctagctgttcgcacacgatgagtgctgttatacggtggacgacactcccgaagcgcggtggataaccgggcgcggcacacgatatgccggtggataaccggttcgcgccgcttaagttatccccattttccagttttgcccctatgccaccgtggaatgcgctacgctcggcgcatgaacggatacagcgaagtgccgcacaatggcgaaatcaacaactatctgcgcaaagatcttgacgccaaagccacggccaagaacacggcctgttggaatctgctgggcaaagtgcgcacgaaacgcacgttgtgtttctcgctgtataccgcattggaattatgcggcgtggagttgccgaggcacagcacgttgccacagaaggacttttatgtgacggtgaggagcaaagggacccgctcttcattggacaatgtcgactatcgcatatggaatgcaaagttcagcagtatcgctttttcaaacggcgtaacctgcatgcatcccatggatgcgtggatacagtttgcccaatatctcaacctcaccgaattagtggtgctggctgaagcgctcatcagacgttatggatatgccattgaacaattcactcaacgactaacggcctttcaccgcgttattggccgtgcgcgttgtgaggcggcgctgaagctcgtaaaaccatcggattccgttcaggaaactcgtacacgcttggcgcttatgcttttcggcctgcccataccgcaaacacaatacggcattaccgattcagagaacggatacacctataccgttgacatggcttatccacaatacaaagtcgctattgaatatgatggcgatcatcaccgtcgcttccgcaaacaatatgtgcgggaccagcaaaaacgtcgacgtctgcggcaattgggctggaccgtcatcgaggtgttcgccgatgacctgtggaacaccgccaaacaacgtgccttcgcacaagaggttgccaccgcgatgcaaataccgcttcctggccgtcctcaaccttcatgccgggtattaatagacggcagccttaccatcaatgcgcgcaaaggggaatacaggaggcggaaacaagcaaaacacaacaaagcctcacaacattgatcaaatacggagttgcgattgctcctcatggggcggcaattcccccatgaggcggcaatttgctcatggggcggtttgaagaaattgtgaaaccgcggaattaagccattttgacctaccgccccatggggttttcaccgccccatgggttgtttaccgccccatgaggaagttaccgccccatggaaggataatcggcaaacgccaagggggacaccgcatggtgcgaggtttgccgcatggcggaggtgccatcgggcggagtatttggcaccccttggcaggtatttggcacattgggccccacccgcaaaaagcaaatggcccttggaattattccaagggccatttgcggctaatagcaccggagcattactcctcgaaaattaatctacgcgtgcggagaccgccgtccgaagccgaaggcgcactgaagtacgtcgagtgctgaggaaaggcggtatacgctccgtagattagttttcctcggcgtccgggtcgtagtcgacgccagtctcggcgcgctgctcgtcggaaatcggggccggagcaccggtcagagggtcgcggccgccgcctgccttcgggaaggcgatgacgtcgcggatggagtcggcaccggccaggatggacacggtgcggtcccaaccgagggccagacccgcgtgaggcggagcgccgtacttgaatgcctcaagcaggaagccgaacttctcgtcggcctcttccttggtgatgcccagcacatcgagcacacgggcttggatgtcgtcgcggtggatacgtacggaaccgccgcccatctcctcaccgttgcagacgatgtcgtaggaatcggacatggcgtgctcgggatccttgtcgaacttgtcgatccaatccttggagggcatggtgaacgggtggtgcatggaggtccacttggagtggccgacagccacatcgtcatcatccggatcgtcggtgggcttgaacagcgggaagtccacaacccaggtgaaagcgaacttcttcggatccagcaggccttcgcgggaggcgagttccacacgcacggcacccagcagcagctgggcggactcgcgggaaccggcggcgaagaacacggcgtcgccttcctcggcaccgacggcctcgcgcaggccgttgcgctcctcatcggataggttcttggcgacggggcccttgagctcgccgttttcgccgaagaccacgtaagcaaggcccttggctccacgctgacgagcccaatcctgccaagcgtcgaactgacgacgcggcgtggcggcaccgcccttgaagaccacggcacccacgtacggggcctggaacacgcggaacggcgtgttcttgaagtactcggtcagctccaccagcgggttgccgaagcgcaggtccggcttgtcggagccgtacttgtccatcgcatccttccacgtgatgcgcggcagcggcagctggacctcatagccggcggacttccagatggcggcgatgaccttctcagtcatggccatcacatcttcctggtccacgtaggccatctccatatcgagctgagtgaactcgggctgacggtcggcgcggaagtcctcatcacggtagcagcgggcgagctggtagtaacgctcgacaccggagaccatgagcagctgcttgaggagctgcggggactgcggcagggcgtaccaggaaccgggcaccagacgggccggcaccacgaagtcgcgggcgccttccggggtggacttaatgaaggtcggggtctcgacctcggtgaagtccatgtcttccagcgcgtggcgggcggccttagccatgtcggaacgcagcttcagattgtgctgcatggacgggcggcgcaggtcaaggtaacggtacttcagacgcacgtcctcgccaggcagcttgttctcggactcattctcaagagcggtggaaacctggaacggcagggcgtcggacttggcgaggatctcgatggtctcggccacaacctcgatcttgccggttgccagatgggtgttctcgttgccatccgggcgcaggcgcacttcgccggtaatctgaatcacgaattcgctgcgcagcgggcgggccatatcctcgtcgtaaatgacgacctgcacgaggccggtcgaatcacgaaggtcgatgaaggccacgccaccgtgatcacggcgtcggtcaacccaaccggcgagggtgaccttctggccgaccagggcctcggtcacttcagtggcatgatgtgttctgtaagccgtctggctcattgtcttgtttctcctcgatttttcgcgcgaatacgtcagatttcgacggtttgctgggcaaccacagtatccggctcccacgacgtgcaatcggcggcaacctgctcgcccgtgacgatgttcttgacctcgtcgccagcgggctctgcgccttccgcaccttcggcagcggtggccgggaaccacacgtacggaatgccgagtttgtccgcgtacttgatctgcttgccgagcttggccgcggtgggtgccacgtcggtggcgatgccgcgcgcacgcagttggttcgcaatacggttggcggccgggcggtcctcttcattccacacagcgaccagcacggcggccgggctgacacggttggcgtgagcgccggcggtgtgcagcatgtagctgaccagtcggctcaggccgatggacaggcccacgcccgggtacttgcggttgccctgggaggcgagattgtcgtaacggccaccggagcagatggagccgagtgatgcggcaccgtcgaggaaggtctcgtagacggaaccggtgtagtagtcgagaccgcgggcgatcttcaggtcggcgatgacggaaccggggcggatggcggcggcctcgtcgacgatcatggccagggtatcaagtccctgacgagccagcgtgtatgcctcggaatccttggcgatgccgtgagactcgcacagcgcatcgaacttggcggcaagctcggcaccgtcggaggcggtgagctcggccaattcgaggcaggcgcgtgcctgtgcttcggtggcgccgcaggtctcggtgagcagtcgggccacctcatcggcaccgattttgtcgagcttgtcgatctcgcgtagcacgccttcgacgtccgtcaggccaaggccgcggtagaagccttcagacaacttgcggttattggcgtgcacggtggccttggggaggccatacgcgcgcagctcttccagcgcggagaccatgaccagcggcagttccacttcatagtggtcgggcaggtcgccggcaccgatcacgtcgatatcggcctgcacgaactcgcggaagcggccttcctgcggacgctcgccacgccacaccttctgaatctgccagcgcttgaacgggaacgccaacgcacccgagtgctcgaccacataccggctcagcggcacggtcagatcgaaatgcaggcccaaccgctcttcaatcggagtgtcggattcatgaccgacctcctgcaaacggctcagcaggtagatctccttgctggtctcgccttttttcaacaaagaagcgccggtttccaccgctcgcgtctcaatgccgatgaagccgttgagctcaaaaaccttacgaagcgtatcgataacacgctgctccacaacacgttcggaggggagccactccgggaatcctgatattgatgcacctttagccacgaaatcaatataataggtgagggttgcgtcaaaacttcctggttcgcccgggatgggagacgctcccgcttatgcattctacgctttaaggagctggccatggccgacgaaactgtcaccgaacccgtaaacaccgctgcgcccgaagagcaggcaacgacacccgcacccgaagccagcgcggccacgccggcgccgactccgtcccccgcttccatgccgaaaccgcacgcgccctcccccgccgccttcgccaagaagactccgtcggccaagccgcgcgctgccgccccggccgccgccaccgccacctattccgaggctgatgtcaaggccgccgaggccttcggccgcgtggatgacaacggcaccgtcttcgtcaaggatggcgacgccgagcgcgaggtaggccagttcccggatgtctccaaggaagaggcgttggcactgtacgcccgtcgtttcctggatctcaaggccaagctcgatctgctggccgcgcgcctgacctcccccaacatcaagacccgtgaaatcgacgagtccgtgaagctgctgggcgaagaaaccgccgaaccggcggtggtgggcgacctcgcggccctcaaggcccgttacgcggaactgaaggccgccggcgaggccaagaaggccgagatcgccgaagcgcgcaaggccgctcaggccaaggccgtcgccgagcgcaccaccatcgtcgagaaggccgaagctctggcggcctccctgggcgacaacaccaactggcgctccaccgccgacaagttccgtaacctgttcgacgagtggcagaaccaccagcgcaccaccgtgcgcatcgacaagccggaggccgaggcgctgtggaagcgcttctccgtcgcccgtaccaccttcaaccaggctcgccgcaagtgggctcaggctcgcgacaacgagcgtacagccgccaaggaagccaaggaagcgattatcgccgaggccaatgagctcaaggattccaccgcttggggtgagacttcccgcaagttcaacgatctgatggaccgttggaagaaggccggccgcgctggccgtaacgaggacgacgagctgtgggccaagttccgcgaagccgccgacaccttcttcaacgctcgtcaggccgatcgcgatcagatcaactcctccgagaaggagaatctggctgccaaggaggctctgctggtcaaggccgaggctctggtgccggtgaagaccgacgccgaggccaagaaggcccgccaggagctggccaagattcaggaagagtgggatcagatcggttacgtgccgcgtgacgatatgcgccgcatcgagaaccgtctcgacgccgttgacaagcagatcaaggccatcgaggatgccgcttggaagcagaccgatccggaggccgacgcccgcaagtccagcttcgaggagcagctcaacgcccagctcgccgagctcgacgccaagatcgcggccgaatccgacccgaagaagaaggccaagctcgaagccgagaaggccactaaggagcagtggctgaacgccatcaagtaagggtctcgccaggtgcccctcagagaggggagctggcagcaaggctgactgaggggagtttacggttataccgcaagctcccctcagtcgtctacggcgacagctcccctcagcgaggggagcttcgtcatatttatgccgttttctcctgccctatactcataacttcaccccatagttcctcagtcacccagcaattggtgtcttacgcctgagtccctaccggtactgcaacaactgccgtgagcccttgatgtgcggccagatattcatgcaacggctggctgtatggcatatccagctcgccgtaattggttccggcacggaaggcggggtaactgtcgccgccctgaagcagatatgaattggacgcgataatcaccaggtcatcgtccgcaatcggtcggccgtcaacggcgaggttcgcgatacgaaccgccgcatgttcgtcggcagcacactcgtcagcgtcagcgttggtatcagcgccggaatcagtatcaacgccggcatcggcattgccgctctcaccagccgtaccgcattcggcataccgatacgtcacgttcgaggagatgccgagccagcgccgctccagtcgcccatcgtcacggcgaaattgctcggcgagcactctcttcacatcgcgcccggtgagcgtctcatgcgcggccttgaactgcaaggccatgagactatccacctcgcgcacggtgactttgccatcgccattcatatcaagccgtggagtccgcagactgccattattcgaaaatccgattatcggcaaacgatttccggcatacacatgcttcatgattgactcgcggttcgcgtccgccaccagcacaccgaccgtattcccgtgcttatccgaaccttgtttgtcgaaatacacgccggaggccaaggtgccaatcaccgcgttgccggcatgattcgaatatgttgccgccgcctggtaaatatgctgagcgcgcgatacctcatcgttcgcctcagcaccggcagacatccaagcggcttgcgccggatgcgcattaagcccttccacgcctagcacgccgtcaaccgccgtatggctggtgccattgccgaggtccacatcggccactcgcaccgtggcgcgacgcccggcaccggtgatgatcaaatcctgcacggccatattccgcccgaagctgcccgcctcgtaaataggcgcaccaccagcggtcgtaccacgcttgatcgcgtgactgtggccggtgtataccacatcaacatctcgcccaatatcggcggcggctgaagcatcggcgtgcagcaaggccaccaccgcatccacctttccggagcgtttgagttcacgggccacgcgattgatcgcgtccaccgcccgttcgtcaagatcggcatcacgcgtaatctgcggagtggctaccgagccgagcgcatcagtaagggcgcccacgaaaccgatccgcttgccgttcaccgttcgaatcgtagagtcacgtacatggctcagcagtccgtcaggcgacttactggcggcagacgtgttggcgcacagccagtcgatgccattgctgggatcagcgatgcgattgttgaaatcggcgacaccgcggtcgaactcatggttgcctaccgccgaaatcgtcaatccccacgctttggccatgtccagcgtgggttggtccttctccaccgccgactcatacggggaacctcccaccaaatcgccggtcgataccgggatcatattgccggggttatggctgtcggccacggtgaaggcggtggcgttgtccgcaccacgttcgatatgcccgtgaaaatcagtgatgtcggcgatggtcaccgtacgggtgccggaagatggattatcgccggaaaaaggaacagctcccgtggttcccgcacaagcataaggaaccaccagagccgtaaggataagcgatactgcaccaaaagcgatccccgatcgcttgccggcccaccgccggttcttcatattcctgctcacaccagtcacgctagaatcgtcgattgaatggccatgcctaggaaggcgactctcaggtgaattcttagcggcgtcttgggatgggaaaggcctgaccccatactatcagggtcaggcctttgcaacccgagtcactacgaatgcgtcagcaagaggagattactcgccaaattcctcggcgcagatctcagctaccgcatccacgcacgcctcggcaatcagacggccgcgttcggcgctcgagccggccggattggcgagtccgccgtgagcgggaacgtcaccttggcgcacagggtagcggacataggatttcgccgtggcaccggcttcctcgaccatacggtccatgtgcaccagttccggcgcgtagtggagcatcaacgaagtttcggtgacggccgcatgctccaatgcccagccggggaacaccaatccatcgaacaccttgtcgataaccgactgcggaaccgggtcccaccaattggtttccacgatggtggccactcccccggtttcgcgggtgaccaggtcgatggcctcgacgatgaacgcctcgttttcaaaatgcgcgttcatgacgacgatcttggtgaagccatcggcgatgagttcgctcagcacgtcgtgcatttgggtgatcactgtcacgccgttcatgtcgatagtgcccgggaacagcggcccgccaccggagagcggcttggacttgtatccgtagctcagggtgggcagcacggtgccgtcgatgcgttccgccagatcttcggcgacccgcgtggcgagtaccgcgtcggtgccgatgggcagatgctggccgtgctgttcggtcgaaccgatcggcacgatgacgggacgagtcttcgcctccttgaattcgggccaggtcatgtggtccatacggcggttgctacccattgcagtactcctttaggttggtggtggattggatggtcgatgaatacgcccggctccctcggggaaggagccggagctgaggagatcagatgtgattcagatccttgtcggtgttttcgtgggagaggatcatcgcgaccaaggcgatggccgcaacgcccaccatgtaccaggccggggcgatggacgaaccggtcagggcaatcaggccagtggcgatgaacgaggccgtaccaccgaagatggcgttggccagattgaagctgaacgcgaatccggtgaagcgcacggaggtggggaacgtctcggtcaggtagctggacagggtaccgtcgttggcggtcagggtggcgcacattgccagctcaaccagcagcacgggccagaactgggaggtgttgaggatgaggaaggcaggaacggtgaggacgatgaacgccacgcaagcgccgatgagcaccttcttgcggccgaatttgtcggagatgtggcccatgccgaacaccatgaacacgtaggcgaccaggcagatggtggtgatggtgccggactgggggacgtccatgccgacggtgtcagacagataggtcggcaggtaggtgagcacggtgtagaagccgaccgcgttcagcacgcaggctccgaagctgatgatcagagccttgagatggttgtggaacaactcggcgagcggggcgaacatgccgctcttggcagcgatttgaccgtcggcggaggcggcgcccttggactcaagcgcatcgttcatcgactggtagacgggggaatcagcgagcttggcgcggatgtacagcacaatcagaccgagcgggccggccagcaggaacggcacacgccatccccaaccgaccatcgcgctagagttcatgttggcggtcatcagcgtggccagagtagaaccggcgagcagaccgatggcggtggaagccggaatcagcgagcagtagatgccgcgctttgaagtgggcgcatattcgccgaggaacgtggccgcaccggcatattcaccggaggcggagaagccctgcaccatgcgcagcagtagaagcagaatcggcgcgccaacgccaatcaccgagtaagacggcaggcagccgatcaggaagctcgcaccggacatgaacataatcgagtgggccagtgcggctttacggcctttcttatctccatagctaccccagaacagtgcgccgattgggcgaaggatgaaggatagcgcgaacacgccgaaggtctgcagcatggcgacggtgtgattgtcggttgggaagaacaccagggcgatagtggtggcgaagtacgaataggaggcgtagtcgaaccactcgatgaagttgccgaggaaggaagataccgcgacttttctgaccatggcctgttcttcagtttgcggggtggaatttatcagtcgtgcagatgtagtaatcgttgcagaactcatgatgtcaccgtcctttcaaggatgtgctgttcgtgtgactgaatgagattcaagtgggaatccgtttcgcagcaggtcgaccagcgccgcgatagcctcgactatgcccttgagtatttgctgaaacgtgaatcgtcgattaacccgttcggcgtagaagtggacaggttgcccagtggtgccggcgcattattcaacatgctgttcttgccatgatttcgtgagtttggcggcgaatagcagcatcgaccagttcggtttgtcgttatagtcgacgccgaccatttgtgtcactttgtccagtcggttgtacagggtttgccgtctgatgcccaattgctcgcacgcgccggttttgctatcgaggttgtcgaagcaggcgcacagtgtgtccagcaacaacggagaggcggcgacctcgaatccgatggtctgcaccacgagcatgcgcatcgccttgtccatatcagaggatgcgacgaaacggtcgacgagtgcggacatggtacttacgattcgcccgtatgccggttcctgattggcgatgtcacgcaataccgcgaacccgtcgaccagcgtcaccgtgtccaatgccactcggccatgcaccacgtatacaccgtcaccttccagcacggcgagcgcatccatgcaatggtgtccgaatgcggccgcaccgtctgaggaatcggtggtggagcaccatccgaccatcaagtcaccttccagcatgcaggagacggcgcatcccgaccgttcttcgaaccgttcgaccatcgtcgatacatggttgatgccttccaccaccgatctgaactgaaaagcgaatggcatatagatgcatgatccggcaaaacccagcgcttcgagcatcgcatgcgcttcctgcgcctcaaatgtattgacgtgcacgccgtcggccggacccatactcagatgatgcatcatgcccatgcgcgcaccgccgtcaatataaagggcggccaccggagacacgatggtggcgatggcccgacgcatcgtggcgtcgaaagtcatggtgcgttgcgtgatctccaatgctcccaccggccgggagcgactttcaagggcgatgacggcgctcgattcgttgccggcatcgaacgcacgacccgctcgagcggccaacagaccgtcaccatcgaaaatggcgacgctttcgccgaacagcgacgcaatggtttcggccacagcctcgatattgccggtacgggacaatccctcacgtaatgaagtggacattgtgtccacctccaattgcaagtgcatctgttcgtgcacgatagcggtattgacgctctgacagatgtcgacaaaaggtacgcgagatttcagaccaatcaacgtcaacccatgcagcctggccgcagacaccagttcgtccggcatccgcaccacaccctccaccagttcgaccaccagagcggcgacaccagcctgtgccaggcttgctacatattgtcctagcgtgccgtgccaatcggcggcgagcagagcgttgccctcgataatcagcatctcaccgcccgaaaggaagctggagacatcctctcgctcgttggtaaacacccatcgcactggcgtatcgaggtctttgccttcgacctgcaccacaggatcggctcgtttgaactgcgtgttatgaagcacactgcgaatcgatacagtcatacaatctgtccattcccccgcggaacaccggtcgttccggttaacctcaccgcaaagcgtgctgttgacaataacctcagttggttacgcgggcagtcggttcacgtaaccgttcggcaacacaccagttgaaggagcgacgatgactaccacactgttcaccaacgcacatatcgccaccggagaacccggcagcacggctgcaagcaccctgccattgcaggacattctcgtcacggatggcgtgttcaccgcattcggccccggactcgcgcaacaatatgaggctcagggtggtgatctggcggccattgaggtggtcgatctgggcggcaaacttgtctgcccaccgttctgcgatacgcatctgcaccttgattacgtattcacggcccgcaagcccggtgcggtgaatgaaagcggaaccttgtttgagggcatccagcgatggagtgagaccaagtccgacttgacggtcgacgagatcaagcagcgcgcgaaaatcggcattaagaaagaaatgctgcatggcgtgcagctcatccgctcccatgccgatgtgaccgacccgaacctgacctcgttaaaggcgctgctggagcttaaggaggaattgaaggatacggtcactctccagatcgtcagcttcccgcaggagggcatgtactcctacgagggcccgcatggcgaatcgggggccgagctggtggaggaaggactcaagatgggtgccgactgcgtgggcggcatcccccatttcgaacagtgccgtgagtttggcgagcattccatgcacacggtagttgagttggcttcgaaatacgacaagctcatcgacgtgcattgcgatgagacggatgatccgaattcccgttacgtggagctgctttcggcattggcgtataaggctggcattggcccgaaggtcaccgccagccacacctgctcgctgggatcggcggacaacgcctacttcttccacctgaccaagctgcttaaggcggcgcatatcaacttcgcctgcgcccccaccgagaacctgtatttgcagggccgtcaggataccttccccaagcgccgtggcatcacgcgagtcaaggaactcactgaggcgggtgtcaatgtgtcattgggccaggattcaatgcaggacccgtggtacccgctgggcaatggcaatatgatgctcattcttgattatgtgctgcatttggcacagatgatgagctttgaagaaatcgacgatgcgttgaagttcctgaccgtcaacggtgccactacgttgggcctgcgcgatatgtacggcttggaaacgggcaagccagcaaacttcattgtgctggatgccgatagcgtgttcaacgccgtgtatgagcgctgctcggtattgcgttcggtgcgcgccggccgcacgctgtttacccgcgaggagaccatcgacaccggactcgccctgctgcaataatccgacacaaacagtagctccccttgacaggggagctgtcgccagaggcaactgaggggtagaccacaaacgtgcacatcatgtgtgcgcaggtctacccctcagtcagcttcgctgacagctcccctgtcaaggggagctttgctggtatgcgctagctacgctatcgaaacggactactcctgcggagcgtcaccggaatcggcgggagcggattcggccggttcagtgaccggagtgacgtcggctggagtctcgccatcagtgtcggcaccgtcttcggcgggcttatcggcggcggccggctcctcgaacttctcacccttgaaggtgaattcgccgaggataccctcgccttccgcatccacaatcacgcgctgaccgtcttcgagatcgcccatcaggatcttctcggagatggcgtcctcgatgtcgcgctgaatcacgcggcgcagcggacgggcaccgagcagcgggtcgaagcccttctgcgcgagcaggtccttggcggcgtcggtgagttcgagcgacatatgacggtcgaacaggcggtcgttgagctgcttgacgtccagatccacgatctggcgcacctgcggctcggtgagctgcttgaagacgatgatgtcgtccagacggttcaggaactccgggcggaactgctgcttcaattcggagctgacctggtccttcatgcgctggtagctggactcgttgttggcacctaggttgaagcccgtgttggcggccttggcgatgtctcgcgtaccgaggttggtggtcaggatgatgatggtgttcttaaagtccaccttgcggccctgaccgtcggtcaggtggccgtcatcgagcacctgcagcaacgtgttgaagatgtccggatgagccttttcgatctcgtcgaacagcaccacggagaacggcttgcggcgcaccttttcggtgagctcgccgccttcctcgtagccgacgtatcccggaggcgcaccgaagagtcgcgaagccgcgtacttctcggagaactcggacatatccacgcgaatcagcgcgtcctcatcgtcgaacaggaattcggcgagcgtcttggccagctcggtcttgccgacgccggtggggccggcgaagatgaacgaaccggacgggcgcttcgggtccttcagacccacgcgagtacggcggatagagcgggacagggcggaaaccgcctcgtcctggccgatgatgcgcttgtgcagttcggcttccatgttgagcagtttcttggactcggcctgagtcagcttgaacaccgggataccggtggtggagctgatgacctcggcgatcacgtcctcgtccacgaccatcttgacgtcggactcgccttcgcgccaggagtcttccttctgcttgcgatcggcttccagcttctcctgcttgtcgcgcagttcggcggccttctcgaagtcctggcccttgatggcctcgtccttgtcggcggcgatcttggcgatcttctcgtcgagttccttgagctcaggcggggcggtcaggcgcttgatgcgcaggcgtgcaccggcctcatcgatcaggtcgatggccttgtcaggcaggttacggtcctggatgtaccggctggacagctctgcggcagactgcagcgcgccatcggtgatggtcacgtggtggtggttctcgtaacgggaacgcaggcccttcaggatctcgatggtctcggcgatggtcggctcgtgcacctgaatcggctggaaacggcgttccagagccgcgtccttctcgatgtacttgcggtactcgtcggtggtggtggcaccaatggtctggagctcgccacgggccagcatcggcttcaacatgtcggaggcacccagcgcgccgtcagccgagccggcgcccacgatggtgtgaatctcgtcgatgaacagcacaatgtcgccacgagtcttgatttccttcagcaccttcttcaggcgctcctcgaaatcaccacggtagcgggagcctgccaccatggaaccgaggtccagcgagtagacctgcttgcccttcagggtttccggcacgtcgccggcttggatcttctgggccaagccttcgaccacagcggtcttgcccacgccgggctcgccgatcagcaccgggttgttcttggtgcggcgggaaagcacgaccataacgcgctcaatctcgttggtacggccgatgaccgggtccagcttgccttcagcggcttcggcggtcaggttgcggccgaactgatcgaggatggcggaaccggacttgttctgcttgtccgtcacgccgccggcgttggccaagtcgcccttgccgtcaccggtgccggtgccggagttgccgcgaatcatatcgatggtcgcgctacgcaactcgcccagatcgacgtccatcttgatgagcacctgggtgcccacgccttcgccttcgcgaatcaggccgagcaggatgtgctcggtgccgatgtagctgtggcccagctgcagggcttcacgcagcgaaaactccaacacctgcttggcgtgcggagtaaaggggatgtgcccgttcggagccgcgttgcccttgccgatcatttcttcaacctgcttgcgggtggcatccagctccacgcccttcgaggcgagtgccttggcggctacaccctcaccttcgcggatcaggccgagcagcaggtgttcggtgccgatgtagttgtgctgaagggccctcgcctcttcctgcgccaacacgatcacgcgccgtgcacggtcggtaaaccgttcgaacatgcttgtccttcctcaattgacattccgtcttactctaccgattcacgatgacgtttattcatcggattccacgaattgcgccgtgagaggagaagaaaacgatatgctggttctagattcacccgtagtcgattacaaggaggctcgaaatgagtgaagctgcaaccaagcccgacatcgttgtcggtgtggatggttccgatgaatcctttgccgcgctgaagtgggcgcttgaggaggcctcgttaaccggtcagagcgtcaacgccgtgtttggctggacgcattcctgggatatggggtccgaaccggacagcgacgaggcctgggccaaggtccgccacgatattgccaacgagctgcgtgtgtgggtcgacaaggccgctgcaggcatcgacttcgatccggcgaatctgaagctcacctcggtgaaggcctccggtacttcggccctgctgcagatcggccatgattcgcagcagatcgtggtcggccgccgctcgctgagccgtatggcccgctggttcatggggtccctgtccgcttcgctggccgaggccgccgaagtgccggtgaccgtggtgcgcatcgccggcagcgaggatgagaccgtgaccgaggccattgccaacgccctgactccgggagacaagcccgttcactacacgcagcctcagccggtggttgaggaggctcgccgcccggtggtggttggtgtggatggttccgagacttcccgccgtgcgttcgatttcgcactggaagaagcacgactgcacgacgcgccgctgcatgtgatgttctgctggcagctcaaggatttgggcgttattccgggctatgagaacgccgtggcaccggtgaaggtcggtcaacgccgcgccgaggagattctctctgagctgatggccaaggcccggattcccgatggcgtcaaggtcagcacaaacgccttccatattcccgcatccaaaggtctgatcgcggcctcgcggtacgccagccatctggtggtcggctcgcgtggcctgtccgggctggacgcgcacttcctgggatcggtgtcccgccagatcgtgaacttcgccgaatgcacggtgaccgtggtgcactgattcaccaaaatcggcatggagtgctaacgcacgcctcggtgatgggcttgcagggaggaattctttattcctgcaaccccatcaccatctacttttcgcggaattcggagtttattcctcgtccgccctgttctggcgcagctgctcaatgagatcgatgacggtttcgagttcaggagtcacatcgtctgaaggacgaacgttatcctcttcgtcgtccatctcatcatcctcatcatcatcggcaacggtgttgttgaggatatcctcttcggtggcctcgtcgtcagcatcagacttggaatcgtcgctggaatcagctgcatcaacatccacaacggaatcagatacgttctgtgcaacggactcatcaccggcagactgggattgcgaggtcccgtcgcctgccgcctcctcagcgggctcagtatcgacggcgttcccgtcaacagtcttctgtgcttcgatatcatcaccggcaggctcgcctgtcttgtcggtttcgccttcggcctcgtcctgggcagccggctcctgcttgcgcggacggttggccaccacgtcgatatgcagatcgtcgaaagcaggcttggactgcacccacagctggcttggctcgggaggttcgatttcggaatgctcgccgcagccgtggtccaaggaaaccacgcggccgtcatccggactccacttgttggcgcacacgccgaacatacggtcgagctcgcccgcgagcggcacgaagaaaccacaggtggagcacaggttgccttcggcggttttggtgctcaacgctttggggcctcgcggaccttcataccagcgcttggcagcctgcgcgcggcccagcgaggtcagcacgtgacggcgggtcagtcggaaggtctcgacggcgtcgttgacatcctgcagcgaggattcctcgacttcgccttcctcgatgcgctcgtcattcggatcggtaccgatcgaatcggtgggagccagatccgtgggctcaaggcgatccttccaaggaatccacttgggcggcatcaacgcgtcctcagtggagatcaaggaggattcgttgacggtccaggagtcgatctcctcgtcgtgatacagcgtcaccgaccattgccatccttcgtagccacggatattcgcggcgaagcggaagtcagtgacgtgatcctcaagatcatatgaggtaacgaaatcccccacctgatcgctctcgtcggccacttcgagcagcacggcgcgcgcgatggcgtgagggtccggtgtcacgatggtttcggtggtatcagtcatagatcagatcagtcctgtacatcgaattgatccgccaccgcacgcagcaacgtggccagctttttgctgtcggcagcagatgggtaacggtgacggcgcaacgtattgccggccgcatcaagcatcttgatgaggtcctcgcagatggcggccatgtcatccgccttcgggcgggtggccttgaccaagctgggagcggaggcgatcaggcgaacatccatggcctgcggcccacgacggccgtccaccacggaatactccaccttggcccccttgcgcaacgtggtgacgccagtgggtagggcctgagccggcaggaacacgtccttgccttcctcactggtgatgaagccataacccctggctgcgtcaaaccaacgaactcgaccggtgggcattgcgaaccttccttaatcctcaatggaaatagtaaaccgaaggtacagtttacctcacagggcttgacctcacgctttgggctgagtcgcctgagtcttacgctcagagctgaaccaagaagtcttctgtttggcgtccttggttttgccggtggactgcttgggctcaggcgcggcgatttgctcaatcggcagcaccacggtgaaggtcaggcctcccccatcggtgccggtggcgcagataaagccgtgatgtgctttgaccacggattgcgcgatggccatgcccaaaccagtaccgcccttttctcgggcacgggacgggtccgcggtgtagaagcgttcgaaaatcttcgagcgtgattcaggcggcacgccggggccatggtccacaaaacgcaatacggcgtatcgatagccggtctgcatcgaggcacctacttcggcggcgtcgatgaaccgccgcattgacgcgtcgctggcgggcatgcgagcgagctgtcttggatcgatggcggccggcatcacaccgagcgcggcttcagcgggcgaatcggcaggcgtgtagcggtggatgttgcccacgatgttggtcaccacctggcgcagtcgagaggcatcaccgggcagtacgacctcaggccaatcgccttcggcaaggctgaattcggcgggatggttcaaatcgcgcgccggttcgagggaaatctgcatgcggcgaacggcacggtccgggtcgagcgcatgcaaatcgtcgacggcgtcggtgaccagcgacgagagtttcaccgtgccggtcatatcgatgccgcgcccctcatcgagacgggccaaagacagcagatcctcaacaagaacagtcatgcgctggctggaccgttcgatatgttcgatggactcgtccgcacgctccaaggcaccaggcatatcgcgctgcatcttatacagctccgcatagccatggatggcggccaacggggtgcgcagctcatggctggcgtcggagacgaaccgtttcatcttgtcggtggtctcctcctgctcatggaaactggattctattcgggtgagcatggaattcagcgaggcggccagagagccgacctcggtgttttccggcgcggaaggaatacgttggctcaggtcgccggctgcaattttcgcggcggtcttctcgatgcgcttcagcggcgtcatcgtgtgctggatgatcagcgtggacagggagccgccgagcagcaccacggcgatgccgaccacaatgcagtatcgggtgagtgtgttgacggtgtcaatttggtcggccagcgacaagccgatgtacaccacggcacggtccttgccgttttgctggaaggtcaccggcagaatacgccatggtgccctcgccgtgacgatggcggcatggttggcattggcagtggggttggccagtaccttggtgatggtgtcagaggaattggagtttccgttggccggatcgttctggctgtccgcactgtcggactgcaccgtgatgatctgcttggccaccgcctgcgtagtgaatgcctgaccgagcgtgatgccattggtatcgccataggtaggcagaatcggcaccgatacgataccgtcctgcatctgcggcatcagcggggtcacgaccagaggattgccttctttgtctttggttccgtcggtgtattgaatctgcagaaagtacgagttcggccccgatgagtcattttttgacagcagatcgatattgttgaccaccagttggctttgcgagcttaactgggtgtcggttttctgcagcatgtagttgttcaccaacgcgcggatggagaaggaaatcaccgacacgccgatgagcagcacggcgatggtgcaggccaccagcttgctgctcaacgagatacggtcgatatgccgcatcagcatgtttttcttacgctcgcgctgctcttggaaatgggcggcgaacggcgacattgcaggcatgggattcgtgttcggggcggcgttcggcgtgctgctcggcggtacgccgcctgactgcttatcggggatactcatgagattgcgatacgttatggatggaggcgattagttcttcggttcgcgaatcatgtatccgatgccgcgcttggtttcgatcagcggagtcaccttgcgcttgccgccttcgccgtcgtcgacctcgatgccgtcgactttcttgcgcaggtaggagatgtacgattcgacgatggctgcgtcgccgccccagtcgtattgccgaacatggtcgagaatctgtgccttggacagtactcggccctcgttgtccatcaggtagcgcagcagcttgtattcggtagggctcaggtcaaccggctgccctgcacgggtcacgtcgtgggagtcctcgttgatttccaagtcggcgacgcgaataatcggatcgtcttccacctgttcgcgggtacggcgcagaatggcgcggatgcgagccacgacttcctcgaggctgaacggcttggtgacgtaatcgtcaccgccgacggtcaggcccatgatcttgtcttgggtgtcgtcacgagcggtgagaaacagcacaggggcgttaatgccttcctggcggatgcgacgggtgacggtgaatccatcgatgtcaggcagcatgacgtccaacacgatgaggtcaggctgcactttttcgataacctcaatggcttcggaaccggaagcggcggtgtttacctcgaatccggcgaagtgcagggaagcgaccagcagttctcggatggacggctcgtcgtcgacaacaacaatcgatgcttcaataggcttactcatgcttcctagagtgtcgcgctcttctgggcgtttcctgaatgtcatcttggagttcggccttggaatccttcttgatctccttgcgccgatgaatcaccaccatgaccacgatgatgatgaccagcgccaccaataccacacccatgatgattatgcctacgatcaccgtggacgatgaggtggaggcttttttggatttcacgatttgatccatcattgccgttgccgcgccagaccagctcggcgggttttccagtaacggctgctgtgcggcttcggatagcttatcgacggttttgttatcgagaagccacgtatcggagttcttggacacgacgaccaccaggttgccgtcattcgaggccacggcaagcatcactgtgttcggcttgggattcatggactccatcacggttgccgcccagtctcccggtttctgttgactattgaaactggaaagatacagcagatgcacgtgtacaccggtttccttctcggttttggcgatggcatccgtgacttcggccgcatgggagcccaggagattttccgtatccgtgatgttctcggtgatggtcacgccgctgtcggtgctgctgctggagctgtcagagctgtcgctcgagttatccccataggcatttgcagttatccacattgcgttcatcgctactgcagcaagggcgcaaatggcgcaaacaagccattttcggaccatattcccgaaggccgaataggacggctccgaagctaggaccacaatagttgtttttccgtcttcccgattcgttgttgacatatcctccaccttaacggccggtattggcaatcggccgccatacataccattaaccctctagaaaaggagcaacgatgccccaatatcaggtagattccgagcgaatccaatcatcctcggccgcagtggccacttcgatctcgcaaatcaggcaggccgtgggcggcatgtacaccaatctcaatgccttgcaggacgcatggcgaggttcggcggccacccagttcaccgcggtagccgaacagtggcgtgcggcccaacagcagatggaggcctcactcgagtccatccaacgctcgctgacgcaagcctccaccgtgtacgctgacgccgaaatccaagcttcgcgcctgtttgccagctagtttcttggctcccctcaaagaggggagccagaatacaaaaaagggactcccgaaggagtcccctttcagctcaatcagctagcgatcgtttgcggatcagtagcccatgtcggcaccggcggccggggcagcagacttcggctccggcttgttggcaacgacggcctcggtggtcaggaacagaccagcgatggaggcggcgttctgcagagcggagcgggtcaccttgaccgggtcggtcacaccggcggccagcaggtcttcgtaggtgtcggtggcggcgttgaagccttcgccatcaggcagggagcggacggtgttgatgaccacgtcaccggacacgccggcgttctcggcgatctgcttgatcggggcctcgatggcgcggaacacgatggcggcaccggtagcctcttcgccggtcagggaggtgacggcctcggtcttctcggccttggcagcagcctgaacgagggccacgccaccgccaggcagcaggccttcctcgatggcggccttggcgttacgcacggcatcttcgatgcggtgcttgcgctccttggcctcgacctcggtggcagcgccgaccttgatgacagccacgccgccagccagcttggccagacgctcctgcagcttctcacggtcgtaatcggagtcggtgttctcgatctcagcgcggatctgggccacgcgagcgtcgatgtcttccttggagccagcgccctgaacgatggtggtctcgtccttggagacgatgaccttcttggcgtggccgagcacggaggtgtcgacggactcgagcttcaggcccagttcgtcggagacaacctgagcaccggtcaggatggccatatcctgcagcatggccttgcgacggtcgccaaagcccggggccttgacggcgcaggacttgaaggtgccacggatgttgttcaggatcaaggtcggcagtgcttcgccgtcgacgtcctcagcgatgatcagcagcggcttgccggtcttcatgaccagctcggccacgtgcacgatgtcctgctgggatgagaccttgccggaggtcagcagaatgtacggatcttcgagcactgcggtctggtcgtcagcgttggtgacgaagtacggggcgatgtagcccttgtcaaaacgcatgccctcggtgaagtcgaggtccaggccgaagcggttgttgtcttcaacggtcacaacgccgtcctggccgaccttgtccagagcctcagcgatcttctcgccgacctcagggtcagcggcggagatggtggcggtagcagcgatctggtccttggtctcgacgtccttggcggcagcgacgagttccttgacgatgacctcggtggccttctcgatgccgcgacgcagggcgatcgggttggagccggcgaccacgttcttcagaccctcgtgaaccagggactgagcaagcacggttgcagtggtggtgccgtcaccggcgacgtcgtcggtcttcttggcgacttccttgaccagctcggcgccgatgcgctcgtacgggtcttcaaggtcgatttccttggcgatggacacgccatcgttggtgatggtcggagcgccgtaggtcttgtcgagcacgacgttgcggcccttcgggcccagagtgaccttgacggtgttggcgagcttgtcaaggccctccagcatgccctgacgggcttcctcatcataagagatgatctttgccatggttgcgtattcctccaaatggctaggtataccggttatcactcgcaagcgtcgagtcgtgacgaccagccgtcagctgccgattatcactctcgacctccgagtgctaacccagacattagcactcgcgcccgccgagtgccaacaccatcggcggcgattgcgctttgggcatgaaaaagccccaaccgtcgaaacggtcagggccttcaatgcacatccttgcgtgcgtgttgctcactcggagcgggcttcacccgaagacagcttgacaacatcctttgcctgcgtgcctttgccggacgaaacgggcgtatactccacgcgatcgccttcgtacagcattttgaacttattggtgctgccgtcgtccttgatttccgcgtagtgcacgaaaacgtcctcgccgccgtcgtccggctggataaacccgaaccccttcttggcaaggaagaacttcacggtaccttgtgccatatctggtctttcctttgttcccttgggcgtcgcgacacaaaacctatagggaacgtagaaagaaccgcatcgcgctccccctacctcgcgactagatgacgattgtacagtgacgagggaacaatctcaaccgcagtggcacattttcggtacgaattattccataggcgtgagaacgctcacagttttcgatgtatttctcgccgatatcaggggcgcatcaacaacgctagttgagcaacaccaccgtaatgggaacggcgagtccttgcacctgctccacagccgaaatgccaagcgtggtcgccacatcctcagcggtggccttatcggtctcattctgataccacaccacggaagaagccggcaatgtgccgctcggattggtcgcctcgacactggtgtaaccggcggtctgcagcacatcggcctgctgacccgcatatccttggattcctgtggcgttgaccacacgcacctgcgtggccttattcacagtcgcgatggcttcggactgctgagactgctgatcggagttttgattctcattcgaggatgtcgtgtcactgtcggtatcggactttgccgaatccgaagtcgagtccttggacgaatcggtcgaagtggacgaggaatcatccttggtgctgttcttggtctcagccttgctggacgaatcggacttggacgtggtcgccgtctgggacgatcctcccactacattcttgtattctccggaaatccatgcccaggccccgacaccgcacagcgcggccaccagaataacgacgatgaacgggcagaggcgggccattaccgaacgagcgccacggtgaactcccaccggtcccttcggaggattgtcgaaggaatccggttcataggattcgtaggtcatcgtgtcgcgtgccataatcgccctttcttcctatcaaaactacccatgagtgtaatcggcaaacaactcatcagtccaccacaccacgccccatgcaccggatatgcacgtttgactacagtggtgagtcatgatcaaaccattgagcgaactggtagagccagggtgggcccatgccttggccgacgtggagcccaccatccaccatatgggcgattttcttcgtgcggaaaacgccgccgggcgcccgtggctgccggcaagccacaatattctgcgcgcgttcaccatcccgttcgattccatcaaggtgctgattgtcggccaggacccctacccgaccccgggtcacccggtgggtttgagcttctgcgtggcgccaaatgttcacccgctgccgaaaagcctgatcaatatttataaggaattggttgacgaccttggggtgcccatgcccaccaacggcgatctgacaccgtggacggaacgtggggtgatgttgctcaacagatgtctgactgtcggcgtcgggcggccaaattcgcatcagggcaaaggctgggaggaagtcaccgaggccgcgattcgtgcgttgaacgcgcgcacggacgccgacggcaagccccagccgctggtggcgattctctgggggcgtaatgcgcaaagcctcgagccattgctgaccaatgccttcattatcaaatcgcctcatccgagtccgctgtccgcttcccgcggattcttcggctccaaaccattctccagagccaatcaagccctagtcaccatgggtgccgacccggtggattggactctttaggcaggccaacagtcattgtgagtagttacagtggggggcatgactttgttccccacgcaaccgaacataccttcgccgaccaccgccgcacgaccggtcgccgttcccgcgcccggcgtgtcggctccgctgggtgccgatgacgccaaacgcgcacgtatcctggccgacgccattcgggcgaggttcgcccagacactggtgggtcaggataatctacgcgaatcgcttatcgtgaccttggtggccggcgggcatattcttatcgaatccgtgccgggcttggccaagaccacggccgcccagacgctcgccacctgcgtatccggctcgttcaagcgcgtgcagtgcactcctgatctcatgccatctgatctggtgggcacgcaggtcttcgattttgcgtcgcagaagttcaccacgcagatcggtccgattcacgccaatttcgtactgctggacgagatcaaccgttcgaatgccaaaacccagtccgccatgcttgaggccatggccgagggtgccacgaccatcggcgggcagcgtatcgccttgcccaagccgttcatggtgatcgccaccgagaatccgatcgaggaggagggcacgttcaacctgcccgaagcccagatggatcgtttcatgatgaaggccgtcatgacctatccttcgcccgacgaagaggctcggatgctggccatgctcacccgccgcggctccgatatgatcggccccgacaccatcaccggcgaacgcatttccgtgtccgacgttgtttttttgcgcaaggcggcacgccgcgtgcatgtttccgacgcgatcatgcgttatgcggtcgatatcaccgccacgtcacgaggtgccggctcccgccccatcaagggactgtcgtccttggtgcgtttgggcgcctcgccgcgcgccaccatcgccttgacccgtatcggccaggcgaaggcgttgctgtccgggcgcgactatgtggtacccgaggacctcaaggcgttcgctcatgaggtgctgcgccaccgtattatgctgacgttcgaggcactggccgatggcgtggtcagcgatcagatcgtcgacaagatcgtcgaaacggttcctgttccgtgagttccgattccgttcgcaagaaaatcgaggcccttggcactcagctgagcctgcctaccgtaaggaaggctttgggcgcgctggagggcgaacacgcatccgggcgtcgtggcggcagcggcgatgcgatggatgtgcatgcctatgagccaggcgacgaatcccgtcttatcgattggaagaccagcgcccgccaaggccgccccatggtggtcgagcgtgagcgcctgtcgacgtcacgggtctggttgctgatggacgtgggcctggagatgactggcgtatgcccttccggagaacgcgcatggcaggttgccgccaatgcgctgcgtatgttcgccgcactgtcgttgcgccggtcggacgatatttcgctggtgttcggcgatgagtccagtatcacccgcgtgccgttcaacggtgggttcgcgcagttcgaacgcacgctggacaaggcgcttgaccgtgattgggatcatcaccgtaatatcgacgcgctgctggaatatgcgcgccgtatcaaggatcgcgaggcattgatcgtattggccaccgatgagcatgcgatggaggagcggcatatcaccacgatccgtcgtattacccgcacccatccgatggtgctgatcgatgtggcgacgatgaatccgttcaaggccgtctcatcccgccacgctcccaccgacggcttgagtgcacggcgtgtgccggcattcctgcgcaacgccaaggcagcggccgaggtcgatactcatcgcgcgtatatggccgcggctttggaacaggagctcacccgtgccggttcccatatcattcgatccgcatccagcgaatccatgttcgatcgtttcgtcgccctggtgtcccgggcattggcccgcaccacacgcaatagactgggtactgcacccgaactggtcggactgactttggctggtgatctatgatgcacagcatgttccccatcatcccgctcgccactgatcccggcgatctcaggcccgtggagtcgttggccttgaccactcccctggtggtggccatcgtcgcatgcctgttgctggcggtaggtctgatcgcgttgatcatcatgctgtctcgccccgcacgcaaacctcggaacagcgaccgtgcgcgtggcgctcatagcaatgccagctccaaggccgagtggcgttcccgcatcgacgatgtggtggcccgtcatgaatccggagcactgccccggcatgaggctttcgtcgaattgtccgtcatcgcccgtgatttcgccggtgccgcatcaggcaaggagcttagttccagtacgctgaccgatttggcgtacctgaatcgcacgcccgcgaatcgccaaggattggacgcattgaagcagaccattggcgcgttgtatccaccggaatttgccgatgatgcccgcaaccgaatcgcccagacgaccagcgtgcagcaggccgccgagtgggtggcgaatctggtggaaaggtggcgttcatgatgctggcatggcattggccttgggccgctctggccggcgtcttggcgacgctggcgattatcgtgctgattgtcgtgttcgcccgccgtaacgccgccgacgacacccctgtattctcgatggacgacgatctcaataccgagcacgcttcccgcctgttccgtcaatggcgcgctttgggccgtctcgccatcagcgtgctggtgcttgcgctggcgctggccattgtgctggtggctcgccccagccaagtggatgccggtgacgaacgcgcttccagccgagatatcgtcctgtgtctggatgtgtcggggtccacgctcccctatgatcgcgaggtcatcgacacctatttggaactggtcaagcatttcgagggggaacgtatcggtttgagtatcttcaactcgacctcacgcacggtgttcccgctgaccgacgactacgaactggtcaccaaacagttgacctccgccagcaaggcgctgaaaggcgtcgagtcgcaggatgacatcgataagatgtccgatgccgaatatcaggacatcgccaattggctcgaaggcacgcagaaccgcaaggacgccacctccttgattggcgacggcgtggtgtcttgcgcggcgatgctccccggtttcgcttatggcgaagccaatcatgcgaatgccgaccgtcagcgtgcggcatccatcgtgctggccaccgacaacgtcgtgtcgggcaagcccacctattcgctgaccgaagcgttggatttgacccagcagaccaaaatcaccgtggacggcctgtattccgggccgaaagccagtgaatcggaccaaaccacaacggatatgaagtccgcgatcgagtcgcatggaggcatcttcctcacccaatcgaatggcgcgtcgatagatgagctggtacgggatattcagtcgcgtagagatacggatgtggagaacaaggcgaaatcctcgatggtggacgctcccggtctgtggacgcttgctctggccgtgatactcattatctggatcgtatgtgcatggaggttgaggcgatgaacggattcaccttctcccccgccttgggctgggtcgccggcggactgctggcggccgggctcgccgtactggccattctcgaaatcgcattatttgttcgtcgccgtgcttccagtgacgagaccgtgtgggcttgcatacgacgtacgcttatgctgctcatcgtcgcggtgatggtactgactcccagcgtggtatcgtctaccacctcacaggccatcaatgccaccgacgtcattgtggcggtggataccaccgggtcgatggcggtggccgacgccacatacgggtccgagaagaccattacccgcatcgatgccgcacgccaggccgtgcatgatgtgaccgccgcttatccggacgccagtttcgcggcgttacggttcggtgcttcggggacgcttgatgtgccgctgaccccggatgcgccggccatcgataattgggccaacacgttggcggtggaagccacatccgtgtcggcgggctccagtctggatgctccgatcgatcaattgctgctgaccgtgaagtcgattcgtgaagcgcacccggatgatgcgattgtgctgtacctcatcactgacggcgaacagacctcgaatgtgacgcgtcgtacgttctcgtcactgcgccagtatctcaatgatgggtttaccgtgggcgtcggctcgaccgagggcggcaagattcccgtcatcgccgatggcgtcagtgccggcgattccaacaccacggaccactgggtggtcgacccggataccggcgaacccggcatctccaagatggatgagaagaaccttaaagacattgccgacgagatcagtggcacgtatgtggccgtgaacgcttcacagactttggcggattcggtttcggccaagtcgtcgaagcagtggcgcatgaccaccacggtcagggaacgcacacgcaccacgccggtggtatggccgttggccattgcgttggcgatattgcttgccatggaagtcggtgcatggatcgcaacctcaaggagactgctgtgagaaacagtaacgaaatccacgagaacgatggctcggcgaatactcggatgcgggcgaagtgtccgctttgggcacgtatcgtcctggcttgtggcgccgtattgctgttgctggttgccggcgtggcggcagtaaacctgtccgcttcgattacgttcaatcaggccaccgcatcattgaacgccaatatcaaagcggctcaggacgagtccacggatatcaccacgctcaaggcgcaacagcagcagaccgacgcgcaattcgacgaggccgggcgaatgcgcacgcttctgttgccgcaagtcaaggacgccatcgacaccaatgcttcgatttcttccgagctgacaaagatcaccctgaaacaggccgaggcgcagaacagcggttccgattccgggcaagcccagtcggcacagcaatccgagaattcttcatccaatgccaaaaagggcggcgcgttgaccgacgaacagaagaagcaggtcgaggagctgatgaaggccaatcagcaatccaccgatacccagtcgaacaccacccaatccgagcagaaagcgacgcagaacaagggtaccggggctaccaagccgtggtaagcagtcgttcacagttgttcttttttctcacaccctcacgggtcatggctttatcgcggctgtttcccggtttcggctgtcggctttggcatttatccaattttcgataggccatggctgatccaaggtatgtccaaacaggctatttgtggataatcgttacgactatgcacaacacttggggataacttcacccaaaatcggcaagctagaaccacattggtcgttccggctggacaagcatgagtcttgtccttttagctggatatatgaatacctacaccagcaacccagcacccatcgatcccaccggcggctttgccggcaatacggtgacgccgttcgattacggcacttgcccttgccatgcggcggtacagcgtagtcgcgacctcgtgtccgtccagcgtgcggccacactggcgcaatcggaccagacggcggtggccgtgaaccgctccagcaacatcgtgtggaccggtaaagccgccgatctattccgatcgcggctcagtcgcaccgcacagtattcggccagtctcgcgcaagacatggagaccacccaccgattggcttgggggtcgtcatgagcgagcacgattactggcaagtggaatcgtccgtttacggcggagtgggatatgcgccagccactcttgaagaatatgccgccatagccaaggctctcgatgacgaggcggcaggatttgcggccatagccacggcttgggaatcggccgcattacagttgcagtcacatcggcatagtgcgccgatgtgcgtcaccttgcagtcgggcgatccgagcgccgttgttcccggccatgtcactgcaccatatgccgcgctgggcaatcggtgttatgaccatgcaacggcatgtcagcggttgagcgatgatctgcgtggcgcggccgatctgctgattcgcgcacactctctgtattctcaggcggagatgacggctcggcgcatgtttaccgaattattgcaggccggcacacaggccaaaccgggatatgccgcggcgggtgttgccgctgtggcggcgggcggctttctggccggctggactattgacggcaaaccgaacccggcatggatgtccacgttcacctatccgttccaggaaggagtgcttagcggcgcgggcggaatcattggcggcgtacctatcggcaagagcattgcgcacaccgatgaggtcaacaaggctgcggggaaaatcgccaatttctccggcccggcgaaaaacgtcgtccaaggcaatcatctggacgtgcgcgaggtgcaggcgaatgccgacgttgtccgcgcaagcggatcggtggccgagtcaatggagaatctgcgcaggctcgccgaagagcggctcggcaaaatcgagctgaacagcggactcgaatatgggaccatcgccattcaacgctatgaacgatctgatggaaccaactcctggctggtcaccatcccgggtaccgatggacagcctgactcaccatttggctgggcgcagaacgtggaactgatgagcgccgatcaggagcgccgcaggaaagcggacagcgctcgcatggttgccgaggcgatgcgtcaggcaggcatcggcaaggatgagcccgtggcgctgatcggccattcccagggtggtatcgttgccgccacgcttgcctcggattgggcggaggaatataccatcgagcatgtggtgacagccggatcgccggtggccaatcatccgattccgcaacgcacgtgggtcaccagcgtggaaatcgatgatgaactggtcgccgcactggatggtgccgccaacccggtcaccgataactggctcaccgtacaagggcatgtatcgcccgcgcccgcggcaacaccatccacagtgcattcggacggctcatgcactcccggcgcaacgcccatcaccggtctgaccccatatgacgccgcacccgtggctggttcgaccaacggcagggagttgtcgcactggatcaaataccatcaggccgcctatcagaacgccaccgacctcggctcccccgccgtgcaacgccacgaagcccatttccaggaagttatcaacggagagctcaaggaaacccgctactaccaaggccgcatgacccagtccgcgaccattgcccctagcgagcgaaccaccgagttcagcacgttcggcggttaaaagtaaataccacacttgacagagttgtcaagaaaggagttaacaatataatgacgagtaggagatggctcatcaaaccgatgaagcaagcggcaaaacgcaagaatgttacgtttgaaagtatcaggcaaggagggagtcatgagatattccaactcgatggacttatgattccccatcccacgtcataacgaaatcgacaacaacctcgcggacattatttgcaaagaagcagaagccaaactcgggaaaggctggtatcagcagtgaaaacatatcaggtcatcgttcgccctggcgaaaaatactggattcttgagattcccggtatcggtttcacacaggcaagaacaacagcagagattgaaagcatggcacgcgaccttatcaccgtcatgacacaagatgctgatttcgcactcaccatagagacaaaactgccgcaatccgtgcaggaacatcttgatgaagctcggcgactgcgcaaggaagaagcggaatgcagatcgaacgcagcgcgggaaactcgcgccgcggcacaagaactacatggcatgggtctcgccctacaacaaataggcgatatactcggggtctcacggcaacgggcacatcaacttgtcaatgcttagcatcaatcggctaccccacaatgcaatcaccgcagagacgcggctagcgccactttcccgggaatgttgcgctagcatgcccgaaaaaccctctatcagcgcaacattcccgggaaagtggcgtgcaaagagtgtcaggcgcgtcgctcgatgagtgcgcggccggatgcgaggcggtcgagcacaccggttttggcgatggccagcatcagataccaggccatcacgccgctgataagcacgccgccggtgacctcggaaatcatgtgcacaatgccacgcgggctgacgaatgacacacccacgtagcgaaacagcatcagatatgtgccgtattccaaggcgaccaacgcaccggatgcaatggaaatcggcagattgaacatgcggtaacgggtcaaggcgaacggaatctcagcgaaaacaccttgcaacagcgccgagataatcacgaagcccaaatcgaactggctaccaatcaccgtttcgaccagcgtgccgataaggttcacgtacagcgccgctccgggtttgcgcagaatcagcaccgccagcgtaccggagaagtaccagacggcgtgcacgatgctggcgaaaccgggcagaatcgcgccgaataccgaagagatcggcatgtacgcgaagttgaatccccagaagatcacgccgcaggccgcacccagcgtggcaccgaccgcgatatccaacggctgccatttcagtgacgatacggcaatcggacgtttcggaagagtatgaatggtggttgcaggcatggtgatctcctagccttaaaggccgcacacagtaatcgaaccacgggcgttccttgacctgtgcggctcgggcgggaacgccgcaccacagtatagccgctcggttcacggctggaagtacccttggaggttatgaagcttaccgatatttcccccgcaatcgcattgaccccactcgacggccgttatcacaaggccaccgccccgctcgtcgaatacatgagcgaacctgccctgaaccgcgaacgcatgcgtgtcgaagtcgaatggatgattcttctggccaacggctttgagggcaacggcaaccagccgatcgttgacggcgtcaagccgttcactgccgaagagcaggccttcctgcgcgccattcccgaggacttcggcgccgaaggcatcaagcagcacgccgctcatgaggccatcacccaccacgatgtgaaggccgtggagtactacatcgatgatcagatcgacaaggctccggccgagctgaccaacatcaacgacgagctgaagaccctcgtgcacttcgcctgcacgtccgaagacatcaacaacctctccatcgcccgttgcgtcaagaacgcgatggaaaacgtgtggaccccggagttcaagcgcatcatcgaccacctcgccggcaaggccgaggaattcaaggatatgccgctgctctctctcacccacggccagccggccacgccgaccacactcggcaaggagctcgccgtctacgtctaccgtctgaaccgtcagctcaagcacatcgaaaaccaggagtacctgggcaagatcaacggcgcgaccggcacgttcggtgcccacttggccgcatgcccggatgtcgactggatcgctgtctcccgcgagttcgtcacgaaccgcatgggcctgacctggaacccgctgaccacgcagatcgaaagccacgactggcaggccgagctgtactccaccgtctcccacgccaaccgcatcatgcacaacctgtgcgtggacgtgtggatgtacatctcccgcggcgtgttcgcccaggtgccggtcaagggtgccactggttcctccaccatgccgcacaaggtcaacccgattcgtttcgagaacgccgaagccaacttcgagatcagctgctcgctgctcgacaccctctccgccacgctggtggaatcccgttggcagcgcgatctgaccgattcgaccacccagcgcaacatcggttccgcgctcggctactccttgctcgccctgaccaacctcatgggtggccttgagtccatccacccgaacacccacgtcatcgagcgtgagctggatgagaactgggaggtgcttggcgagccgatccagaccgccatgcgcgcctgcgagctcaagggcctgccgggcatggataagccgtacgagaaggtcaaggagcttatgcgcggccacaccatcaacaaggaacaggtcgagcagttcatcgaccagcagtccttcgacccggaaaccgccgctcgcttgaaggctctgacccccgccacctacaccggtgtggccagccagctcgtcgctttcggccgctgagataggcgcgatgcgagtctctcgagtccctcgagtccctcgaatccttcgcatccaccacactactgcgctgagtcacaaaccgaaccgcaaactgaaccgaacaaggacaggcgtcaggtgaccatttcatgactactgaacaggatcagtccactacggaagatcgcccgaacaaggcgacctcctccactaccgaccggccgatcgcctctggtgacggccggtcggccagttttgctgtcagcggaccggacagcccggcaaccgacgacagcaacgattccggaccatacatcgacgacatcgctccgcgccgcacgcgcgacttcggcgacctgacccgagccggtctgtcgctattgatggccgccgtggtcatggtgttcgccgtgtatctgggcggcatgacgcgcggcgtcgaatccgacgcgcataccgccgcccaagccatcaactggctggctgctttcccctccaccgtactgacgcagctggccaccacggtcatcgtagttatcgtgctcgctcagttgctcttggcccgcgaatggctgcaagctgcggtgtccgcgctggccatgtttgccggatacggcattgtgtgggtcatatcgacggcaatcagcagtctgaacgatttcaccctgccaatggcactggtctcagccgccacctcatacggctccgggctgctgcccgacatctacgccggcatggcgtccttcctgaccgccgccgggccacgccgtacccgctccacggtcaaatggagttggaatatcctgtatgccatcgccgcggtgatggtggtgctttcgtggcattcggttaccggcatgctggtttcgatggccgccggtcgcacggtgggcatgctgatccgattcgtggtcggcacgcagaacaagggcgtgtggggccaagatctggtcgccgccctgaaaggcatcggactggacaccgcctcgctgattcggcatcaggagcccggcgtcggccacggttcactggccgtcacgctggacgacgatctggccgaaggctcgcgcatctacgatctggataccacggacaaccgtcgtttcatcgtttccgtcatcgacgcgcagacccataccgtcggctatctgaagcagttgtgggactgggtgcgtttcaccagtgtgtccatccgacgtgaccgttccgtgcgtgacgccgtccagcatcatttcgccatgctgctgggtctgcacaatatcaaactgcccgcgcccgcaccctacggcatcgccgataccgacgaatccgcgattctggtgctggatgcacacactatcgaactgcccgccaacctgaacacgcttaccaaggcggatgccgtggcctacatgcgctacctgtccgtggcgagccggcgcggctatacgcaccggcgcatcacgccggacacgctcgcccggcttgaagacggcaccgccgtgattgccggctggctcaacggcgacaacgcttccggtccggccaacaccgcgctcgacaaagttcagctgctagtgctgttcgccgcgctgatcggcgtggaaccggcggtggaggccgcccgcgaggcgtggggagacacgactctgacggccttggccccgttcattcagaaggtcgcggtcccctcccccacgcgcgcgctggaatcctgggacaagcagctgctcaagggcctgaggagtcgtatcaccgcgctggctgacgaggagacggtggaatccgccgaaccggtgacgctggcccgattctcctggcgttcgatgatcaccatgctgctggtcatcgtggccgtggtcgtggtcttcacccaactgaagcccgaggagatcatcaccgcgctgaccaacgccaacccgttgatggcggtggtgacgctcgcgttcggtgtctgcggctggatcggctcgtcgatttcgctcggttccctgatggcgcggcacaagcgtgacaatatgggcgtcttcatgagtcaggtggcaggcggcttcgccaccgtatccatgccagccggcgtgggcccctcgttcgtcaacctgcagttcctgcgcaaatccggctatcgcaacacccaggcgaccgcaatcatgagcgccgcgctcgtggtgtattacgccgtgtacttctccatgctggtcatcatcggcctgttcaccggccgcaacatgttctccggcgcaatcccgacaaacacgttggttatcgtgctgggcgttgtggtcgtggtgctgtccattgcgatgatgattccgccgttgcgccactgggtgacccgtcgtcttatgccgctggccaagacgtatatcaaccagctgctggacgtgctttcccagccccgacagctcacagtcagttgcctgggcgcgctgttccagaacgcgaccactgggctcgctttctgggcggccctgcaagcgttcggccattcatcgaatccgattgaaacgacgttcgtcttcctgctggcctatgcattgggttccgcagtgcccactccaggcggtctgggcggtgtggaagcggcgctgacattcgcgttcgtggcggtcggcgtgcctcagggcgtggccctgtctgccacgttgctgcatcgcgtggtgttctattggctacgaattccgctgggcgcagccgctatgaagtggctcgaccgtcacaatctcgtctgatttgtccgtttttgtccattttgggcttcagaacacgaaatagatgtgaaaagccttataagatgcgggttttcgcagaaacatgcgctagtatcattgatgacaacatggactaagcaaaagtgcttgtcccctgacccaagaaggatgctttatggcatacaacaagtctgacctcgtttcgaagatcgcccagaagtccaacctgaccaaggctcaggccgaggctgctgttaacgccttccaggatgtgttcgtcgaggccatgaagtccggcgaaggcctgaagctcaccggcctgttctccgctgagcgcgtcaagcgcgccgctcgcaccggccgcaacccgcgcactggcgagcagattgacattccggcttcctacggcgttcgtatctccgctggctccctgctgaagaaggccgtcaccgagtgaccttctgctcgtagcgattacttcgagcattactgacgacaaagaccccgaccgagatggtcggggtctttttgttgtggtgctgtgacgtgttgtccaaccgtattattccggactagttcagcgcttccataagctgctcgaatcccagggtgggctcggcctcgaagggatcgaggagtatggcttcccggcgttcgggggcggtcagggtcaggtgggtccagtcggcggagaactgggctccgacgttcagggccgcgtccacgaaccggccacgcagggcggcacgggtgtcggtcggcggattgtgcacggcgtattccacgttgtctcctgtcagcagctcacgcatctggttgcgggctacgagcgaaccgtacaggcgaccgttggcgatgtcgtggtagtcgagctcaagctgttccatctgggcgaaggtgacgtccgggcgacggcgtttgagcgcgtcgaacagacgcttcttggcggcccagtctacgcggtcggcgagcgcatcgtatgcaccacgctccagcgcgtccagaacgcggctccactcccccataatcgtgtcgatcgtggtggccggcagcgaacttgccagcgcatcgacatgggtttcgatgaaggccttgaccgccgcataataccggcgctgcagacccagtgcggacacggattcgcctgattcgagcgtcagttcggcgcgcggatcgtcaaggaatcgactgaccgtgcgattggcggcagccggatcagcaaaggcatactgctcgaatccggacggaacgccatggcggaaggcgtcttcgatcgcgcacagcacaaggtgcgtgacggcgagcttcatccatgtggaccattgcgaacggttcgagtcgccgatgatcacatgcagccggcggaaggagtcggggtcggcgtgcggttcgtcgcgcgtgttgaccatcgggcgggagcgggtggtggccgaggagacggcctcgtccaggaagtccgcgcgctgggtgatctggaagccgtccggggtcatgcggccggcaccggtgtacagctggcgggtgatgaggaacggcagcagctggtgttcgatggtctccaacggcacgaagcggcggaccaggtagttttcgtggcagccgaaggcgtggccggcggagtcgacgttgtttttgaacacgtggatcgtggcgtgtgcgccgtaggattcgcgcagcttgcgctgggccttcagggctaggttgcgcatcacgtgttcgccggcgaggtcctgggccagggcctcgcgcggatcgcgcgcttcggcggtggcgtattcggggtgggatccgacgtccagatacagacgtgagccgttggtcagataggtgttggcggagcgggagcgggagacgatgggctggaacatggtcatcgccacctggccggcgtccacggggcgttcggcaccggtgaccgccacgccgtattcggtttcgacgccgaaaatacggcagaacccgtccatctcggcggatggtacgggttccgtggcgtgcagggagcgggtgccgctgtcacgcagttggggcatcactcgccgcctttttgcacgaagctgttgacgtattcctcggcgttggtttccaaggcggattcgatgtcgtcgaggatgtcgtccaacacgtcggcttggtcggtggactcggtttgggcggcggcctgcgtggtggcgagggcgtcgtcttcctgggtcgcggcctgctgtgcttgaggttgttcgaattgttgtggcatgttgtcttcttcttgggttgtcaaactcccctcagtcagccttcggccgacggctcccctcacccgaggggaaccggaggagacaggaaattatcgctggttgatggagtcgggccacggatactggtgcaggtaatgctgtagttcgcggatgatgagtccgttggaggccactacatcgttatcgtgacgccagtggatgcgttcgccgtcccaacggctcagcgtgccctgcgcctcccagaccaccacggtgccggcggcgatggcggggatatcccacacgtgcagcatcggctcgaagtaggcgtcgtaggtgccgtcggccactttgcacaggtcgagcgaggcagggcccacacgcttgatgtcggccgggcgtccggcgagcgaggatgccacgtcgagcgcacgctgcgattcgccgggcaagaaggacatgccgtagcccagcacggaaccatccagtgaggaggtcatcgacggcacgactttgtcgcgcttttcgccgaccgtggttttgtggatgcgcacggcgcccgctcccctggcggccaggtaggtcaggccgagggccggggcgtgcacgatgccgatgatcggcttgggctcattgtccgggccgaattcgaacagggcggcggtcactgtccattcgctcatatggcgtacgtagttgatcacaccgtcgattttgccgatgtaccagtaacgctggccggggcggctttcggcgggtcgggtggtccagaagccgtcgaagtgggcgatgtcggcgattctggagctcataaagcgcaaaatcttgctgtcgacttcgagcttatagcggggaccacgatccgcgttctcggtgctcggctgggcgaggttacgcggattgagttggtcgtggagggcatgctggccggcttcttcgagcaggccggcgactttgagcgcaaggttgcgcaggtcctgtggggtctcttcgcgtgtttcttccatagctaccaagtctatcgttcggcgttgatggccagcgacttcagcagatcgatggcgtgttcggctgaattgagttcggtttcgcagtgcgccttggtgaaggcgagcggatcggagatgtcgagggagaacaggtgatggtcggtagcggccatatggccggcattgccgtagaattcgaccgcctcgccctcgtctgcggcgcgcgggtcgcgaacagtgagtcgggaccagctggcggcggccacctcatcgccgaattgcgccacgagttttgccctgagccaggcgcgggtgtcttccggcggttcggtggtggcgcgtgcgatgtcggcggcgctcaccacccgttcggtgcggggttcgagtttggtgaagatgctgtccgcggggtcgagcgccgcccatttcaggtcgatgaccttcagtcgcggatcattccatccgttggccacgccgggtgcggacgttgtggtgattttgcggcgcagtttttcgagcagctgccatttgagcagccattcgatgcggctggcctcgccggtcatggccagacgttcgtcatcgtcggcggcatggcggatggaggcgcagtcgatgagcgcctgctgccacatcgccataatggatgtggtggatttgtccggccaggcgggttcgccggcggtgtcggtaccttcgaccagtgcggcaacctggtagacggcttggcgcagtttgagctggataagccatgcgttggtttcgccgccgttggccagcggcaagattgcccccagcgtcaggtcgcgggaaacggtgtgtatggcctcgactgggtcagacagttcgagttcgtcgaggaaggcgttcaggtcgaatccggcctcgtccgcatgttcgagcagccacagcagcatgctcgtggtgccgagtttcagtgcctgcggcacctccatgcgattggcgtcgccgacgatgacgtgcagacggcggtatgcatcggtggagtgggattcgtcgcgcgtattgatgatcgggcgttcgaaggtggtttgcaggccgactttggcgtggatgtagtcggcgcgctggctgagctggtagcccgggatctcgctgttctcgccaatccctacgcggccggagccggcgtagatctggcgggtgacgaagtggagggtcatcaggcgtgtgaccaagtcgaatggcaccgcgcgggccatcatatagttctcgtgcgtgccccagcaggagcccttgccatccacattgttgcgatgcagggcaatgggagtgccagtctgtttgcgggcgtgttcggtggcggcctgcatgatgaggtctccggcgtggtcgtatcggaccgcttcgaacgggtcggtggtttccggcgccgagtattcggggtgggcgtggtccacatagacgcggccgccgttgggggcgatcacgttggtgatgttgagctgcggggcgtcggtgagcatgtccgggcgggcggcggcgcgttcgagacgggtgccgcgcgcgtcgttgaccgggtcctcctgccggtagtcccagcggatggatttgctgtggctgtccgcggcgccattcaccacgtcgaaggacagttgcaccggattgtagcggtccggggtgttcagggataccgcgtattcggtttcggtgcccatcactcgtttaacggtcatgtagtgctccttgagcttgagctattcggcggtgcggatgcggcggatcgggtccatgccgttgatgcgcgaccattgttcggggtccacgtcggccatggaatcgcgggtctcgcggtattcgtcttccacggcggcagcgagcagcggcacggtgagtgccacgtccaagccggtttcgatggattccttgaccgctcgggtcttggcccggtccacgatgttcttgagcatcgcgccggagaccacgtcggccaggaacaacgcatgccactggccgttctcctcctgcacgtcgcatagatggcggcgttcggaggttccgtagatgtcatgcaccagcacggcggacaaggcgtgcgcgtcgacgccatcttccagaggcaggtcgtcggtgaggtaatggtccacgatggcgatggcctgattggctttgggccgaccaacgcgaatcttgacgtcgagacgccccggtcgtagcacggccggatcgatcatgtccacacggttggatgcgccgatcaccatcacattgtcgagtgattccacgccgtcgagttcggagaggaactggggcacgatcgtggtctccacgtcggaggagacgccggagccgcgggtgcgcagcagcgaatccatttcgtcgatgaacacaaccaccggattgccgtccgcggcgcgttcacgggcacgctggaagatcaggcgaatcagccgttcggattcgccgacgtatttgttgagcagttccgggcccttgacggacaggaacacgcccttgacatgggtttcggccgggctgatcgagccgtcgccattcgtatcgtaaccaccctcgcacagggcgttcgccacggccttggcgatcatcgtcttgccgttgccgggcgggccgtacagcagcacgcccttcggcggcttcagatcgtagcgctcaaacagcgcacgatgctggaacggcagttggacggcgtccctgatacgaccaatctcactatccaagccgccgatgtcggcgaacgtgacgtccggggtctcctccagcaccagatccttgtcgccctcggcgggcagcgcttcgatggcgaggcggacggacggatcgacgataatgcggtcgccctgattgatgcccgcatacgcgagcgcgccggaacggcggatgagcacgggattgccggaggcgtcggtaacgatcagtcgaccgtcgtcaagtacctgcttgacactgcgaatctggcccacggtgtcagcgtcgcgctgctcgaccagcacgagcttctcgttgagcatcacggtggccccggcggtcaggcgggcggcgttgacgttggaggccacaggcaccaccatgcggcgggtgccggaaatgacttcggccgacgcgtgctggatgccgtcttcatcggtgcgggtggaatcgaccttgaccatggtggcgaaggtgagcggcggctgagcgagctgggcgagctgtgacttcgccttggtcagttccttgccggcgcggctcagcgcttcggcgagcgcatggttcttggccatcaggcgatcgttcagcgcggcgagatcttcggtgtcgctcatgcgggttcttcgcttcccttctatccgggattttcggcaacttatggcagtcggcagaccctattcgttgccgtcggcggatttcctgttacgtataacagtacgcacttttcgcaccacgaaccatacgatgaccacaatcacggccgcgatgaccacgtcctcgaacacgccgagcgcgccttgaatcgagcaccactggtcgccgagcaggtaaccggcggaaacgaggatggtgttccacacggccgagccgagcagggtccagccggtgaagtgcaggaagttcatgcggttgaatccggcgggaatcgaaatcagcgagcgtaccacgggaatcacgcggccgatgagcaccgaccatgtgccgtatttggtgaaccagtcgttggctttgctcacgtctttgcggctgacgccggggattttgtctgccgcgagattgatgcgatgcaggcccacccagcgggagatgccgtacaaggtccaggcacccagtacggagccgatggtggcccagatgattgcgcccggcagactcagggtgccgcgtgcggcggtgaagccggagagcggaaggatgacttcggacgggatgggcgggaagatggattcgagggcgatggccaaggccacgccgataccgccgatggtttccatcagcatgatcagccagtcggtgatggtgccgatcaggccgggttcggtggtggtgcagatgggtgtggggtcggttgcaagaatagtggcggctgccatggaaaaactcatagagggcattgtcccaaggttttcccagaatcagaagcatgacgcaagaagatgtgcattttgttgacaagtccgccgagagcgaagttgggagcccggctgattctgcggtttctgtgccgacgctgagcaagcccggcctgctggttatggatgtggactccacgctcattgacgaagaggttatcgacgagttgggcgtggtggctggctgcggtgaggagattgccggagtgaccgcacgcgccatgcgcggcgaactggagttctgcgatgcgctgcgcgcacgagtggccctgttggagggcctgccgatctccgtgttcgacacggtgcatgacaagctgcatttcaccaagggtgcactggagcttatcgacacgctgcatgaacacggttggaagatcggcgtggtgtccggaggcttccatgaagtggttgacatgttggcggccgagagccatatcgactattggattgccaaccggcttgaggttgaggacggtcatctgaccggcaaagtgcttggtgagatcgtatgcaagaccgtgaagttgcacgccttgcaagcgtgggcggaccgtttgggtattccgatgagccagaccgtggctgtgggcgatggcgccaacgatattccgatgattcaggccgccggtctgggtctcgcgttctgtgccaagccaaagacccagctcgccgccgacaaagccatcaacgaccgcgacctaacccacgtactcgattacctgcgccggtaaaattttaccgacctcggctccggcacttatagttgagccatgactacttcaggcgcagaacagttgacgcttgcggggctggctccccgcaagcggcgtaaacgtgcgcctgcggagcatacgccggccgagcagcatcccatagcgcaagtcgtgctgaatgtgcaggcgctccacctcggtcagacattcgattacttcattgatgaaaaagacagcgaggccgcacaaccgggtgtgctggtgcgcgtgcggtttggcggtcagagggtcagcggcgtgatctgggcacgcaccgataccagtgatacgccgcgctcttcgattcgctatatcgagcgagtgctaagccccgatgtactggttcccgcttcgatgcgcgaggatatcggtctggttgccaaagcctatggcggcacacgggccaatattctgcgtttcgccgtgccaccgcgcgtggccaaggtggagaccgagcagcggttggccgcgtcgttccgtcggccggtcggcggctcattgccggataatacgcagggtggttttgccgggcgtggcaccaatcccgatggggccaaacctgctggctctacctttgccgttgccagtaccgtttcggagggggctgcgcaggggtatcgtcgtctgaccgccaattacgccgacgtcaatgtgcttcatgatgcgcttaccggtcagcgtttccaatcttttgtgtttgattcgctgcccggtgcacaggagtggcaacggaacatggcatggatggtggccactgcgctgagtgccggtaaagctgccgtggttgaattgcccaccatgcgcgaggtcgaagacctgatgcctatgctgcgcaattatgggctcaaaccgttcgcccctgctccggccggcggctgggtgggcgacgtcgccgtgcttaacgcggagaccatgcccgcggccgaccggtatcgcacctatctggctgtggcgttgggacaggtgaaggtggtgatcggcacccgtgcggtgatgtatgcgccggttgaaggcccggcgctgttcgccattctggaggatgccgcctatcagaacatggacggtatgatgccatatccacaggcccgtggcgtgatgcggctgcgcgccaagtcccatgacggcgtgttcgtggccatggccaatgcgcgcaccccgcaaagccagtgggaaaacaccggtccaggtacagtggagaccccagtgagcggctattccaccacaattcatccgctcgcctcgccgctgaaggacgccactccttgggtgcgttggctcaatcgcgatgaacttgcgcgtcttgccgacccgtccatcggggcgcgcgtgccgcatacggccgtccgcgtgctatctaaggctttggagagcggccccgtgctgctgtccattccgcaagacagcgtcagtgagactctgagttgtgcgaaatgccatcgtcaggcgcgttgtgccaagtgttctggaccgttgcaactaccggccgaccgccgggattccacaccgcgatgccgctggtgtggggctgctgccatcaattggaagtgcccgggctgtgggcatgaacgtatgcgtgtggtgcgcgtgggtgctgcaggcactgcggctgaactggccggattgttccgcggcgtgccagtagttttgtccagcaagacgcagggcctggtgcgcgatgtggcttgtcagccgattatcgtcatcgccactcccggtttcgaaccgcgcgtgcgtccggtcagtgccgagcagggatcggctggccatgagtatcgtgccgtggccgtgctcgacgcttggaccagcttgtatgcgttgggcgtggatgctcgcttggatacattgaccgcgtggatgcgtgcggtgtcgttgtgcgcgccgcgttcccgtggcggccaggcgttgattctcggcgaaaccgacccggccatcgcccaatcgctgatgctctgggattcgaggattcttgcagccaaggatcttgaggagcgtgtggagaccggtatgccgccggccgtggccgccgcctgcgtatggggacgccgtgatgcggtgatgacgctgatgcagcgtatcggcgcgctgggcggcgattggacggcctgcggcgagctgcccggcatgttgggcccggtgccgatcgcgcaaccggacacggtcgacgcccgggagctcgaagccacggacgaccgggtgaaggcagtaatccgtgtgccgcagagtcggcgagccgagctggcggcccgactgcaccgggaaaccgctcgtcatgtggcgtcccgcgaacccggcgagcttcgcttccgagtagatcccaaggacctgatctaatcgtcttcaacacgtgaaacgataattacagaatgaacatcgctagaaggaggacactatgaagggttggcctggagagccggatatggattacgacgtgctggtcgcggatggcgaggccgctgcgaacgccggcaagccgatcaccgacgtgatcttcgatttcggcaacgtgctgatttactgggatccggtcgccgtactcatcccccgctacagccagaagaccatcgacgaattcctcgacaacgacatctccggcttctacgatgtcaacgacctgatggacggcggcaccagcaccgacgaggccatcgccatcatgcgccgtgacaagggcgataagtgggcggacatcctcgactactacatcaagaacttccgcgactccctgaccggcatcgtgccgggcgcgcgcgtgctggtcaatgacctgaaggctgccggcatcggcgtgtggggcctgagcaactgggaatccagtctgttccacgtggccgaggaacagtgcgatattttgcagcagcttgatggcaagctcgtctccggtttcgtcaagctgcgcaagccacacaaggaaatctacgaggccgcgttgaaccagttcggcatcaaggccgatggcgcgttgttcatcgacgacaaggccatgaacatcgtcggctcgaatgcggccggcatccgtggcgtacgtttccaggatccggtcaagctgcgtgaactgctcatcgccaatggcgtgaacattccggccgtgcagtgagcatcgacatttcaaggaggaccatgctcaaactcgtgttcgccggcacccccgacgtggcggtgccctcgctcaaggcctttgccaccgatccacgttttgatgtggtcggcgtcattacccgccccgatgcgcctaccggtcgcggccgcaagctcacgcccagcccggtcaaggcgacggctctggagctcgggttgcccgtcatcgatctcaaaccccgctcccccgaattcatggaggcgttgaacgacctgcatgcggatatcgccgctgtcatcgcctatggcaatatcctgcccaagaacgtgcttgatgcggtgcccatgggctggtacaacctgcatttctccaacctgccgaagtggcgtggcgccgctcccgcccagcgtgcgatttgggcgggcgacccgaccaccggcgccgacgtgttcaaggtgggcgagggtttggatgatggcccgatcgtcgcttccctgaccatcgaactgaccggccgtgagacctccggcgaactgcttgaccgtctggccgaggaaggcgcgcccatgtatgtggatgcgctggccgccgtaggtgaaggcaccgccacattcaccgcgcagccggccgagagcctggaatacgcgcacaagatcacggtgaaggacgcccgcatcagttggacggacgaggccgaggccatcgaccgtcagattcgcgcctgcacgccacatcccggggcatggaccgaactgtttgcggaagggccaatcgccgataatgacgagtcaaccgctaaatccctcgccctgcatattctcgccgcgcaaccggccgaccagtccaatcccaacactccggccgagcttcagcccggcgagctgaaggtgggcaagaagaacgtgtgggttggtaccggcagcacgccgctggaactcacccaagtcaaggcgcagggcaagaaggccatgcgcgccgccgactgggcccgaggcgcgcgcctctcccccgccgcctgcgtgcgataacaagcaatatcgctcccgcccggaagcacagcaaaaagcccggcatcttcgcgaggaagataccgggcttttcagctatgcaatcggcgatcagtcgagaccggagagcttgttgatcagctccgggtcacgcgtcgcacccttgtcggccgagcgggcgaaggcggcgtacgccttcagcgcctgggagacgtggcggttgcggtgagccacgtagccgtcgccagcctcaagctcgcgacgacgctcgtccagctgctcgtcagtcagttcgacgttcacggaacgggcttcgatatcgatatcgatgatgtcgccgttcttgataagcgccaccggtcccttattggcagcctcaggcgccatgtggccgatggccagaccggaggaaccgccggagtagcgaccgtcggtgagcatggcgacctgcttgccgatgcccttgcccttgacgaaggaggtcgggtacagcatttcctgcatgcccgggccacccttcgggccttcgtaacgaatcacaagcgccatgccgggcttcagggtgtcgttcagaatgacctcgatggcctgctcctgggagtcgaccaccagagccggtccacggaacttccagatctccggcggaacaccggcggtcttgaccacgcagccgtcgggggccaggttgccgcgcagcacggcgaggccgccttcgtgaatctccgggtggttgatgtcgtggatggcgccgttggcgcggtcacggtcgagcgaatcgaacagggtggtgtgggtccacggctccggggagatgatgtggccaggagcggccttgtacatctgctgggcttcctcggtgcaggtcgggcgcatgatgtcccaatcggccagcttggcttccagcgtcggatagtcgatggagtgcacgttggtgtgcagcttgccggcgcggtcgagctcgccgaggatgccggtgatgccgccggcgcggtgcacgtcggaaatctcccacttgccggacggcgaggccttgcagatgcacggcacggtgtgggaaatacgctcgatgtcgtccagggtgaagtccacgtcggcggactgggccatggcgaggatgtgcagcacggtgttggtggaaccgcccatggccacatccatggtcatggcgttctcgaaggcttccttggtggcgatggagcgcggcagcacggaatcgtcggaatcgtcgtagtactggtgggcgatcttgacgacctgcttggcggcacgctcgaacaggtccttgcggtaggagtgggaggcgaggatggtgccgttgccgggcagggccaggccgatggcctcggtcaggcagttcatcgagttggcggtgaacatgccggcgcaggagccgcaggtcgggcagacggtcttctcatagttgagcagttcctcatcggagacgctgtcgtcggcggtggcgtacatcacgtcgataaggtcggtgctcttgacggtgccgtcggcgagcaccgtggtgccggcctccatcgggccaccggagacgaacacggtcgggatgttgaggcgcagggcggccatcagcatgcccggcacgaccttgtcgcagttcgggatgcagatgagtgcgtcggcacagtgcgcgttgcactggtattcgacggtgtcggcgatgatgtcgcgggagggcagggagtagagcatgccggtgtgacccatggcgatgccgtcgtccacggccatcgtgttgaactcgcgcgggatgccgccagcttccttgatagcctcggaaacgatgcggccgaccttgttgaggtggacgtggccgggcaggaactcatcgaacgagttggcgatggcgatgatgggcttcttgcccatgtcgtctccgttgacgcccgcagcacggtagagggctcgggcgcctgcaaagacgcgccctgacataatttttgcagatcgcatttcagtcatggttctattcaagcccttgtgagggacacgccacttgtcaagagtcgaataatggaatttgcaaaagcgtaacgtttctcacacatatttttggaatacattcctccactggaagtctggcggaggtccggcagaagtccccccaaacggctacacttgcttcggttgagatagattttccaatgtctggagataagaacaatggcttttggtactgacccgacacccgacggtcttgcgaacccgccgatcgacgacctgatgaagcacgccgattccaagtacgcgctggccattttcgccgccaagcgcgcacgccagatcaactcctacttcacgcagctcaacgagggcctgctgcagaacatcggcccgctggtcgaataccagaacaatgagaagcccctgtccatcgccttccgcgaaatcgacgagggcctgcttgaggagaccttgggcgaggacgacgccaacgagggcaactgatcgattccgacaattcgtttggattgtttggacagttcgtcgccgaatgatggtgtgagagttctctcacaactgattttgagcgacacgcttgcctgagttatcgcaatcggctataactcaacatcgggagcgaataagacgcaaggctcgcgccaccgcgctggttggcacgagcctttatttatgcccgcttccacagtgacaagtaaaaattgacaccgtatcattgtgcctcgcatcccgcggggcgataagtcctgaagaaagggatgatatgacagaagaacatcggcttatttccgccgaatccgtgaccgaaggccaccctgacaaggtctgcgatcaaatctccgacgccattcttgatgatttgctggcccaggattcgtccagccatgtggccgtggagacctccgccgccactggcgtgttcctgatcttcggcgaagtcacgtccaaggggtactgcgacgtgcagtccaaggtccgcgaaaccctgcgcaacatcggctacacctcctccgaagtcggccttgacgccgattcctgcggcgtggtcgtggccatcaccgagcagagcgccgaaatcaaccagggcgttgcccgtctgactggcgatcaggagaccgccgccagccgcgaagagcgttacgaagcacagggtgccggcgatcagggcgtgatgtttggctacgccaccgacgagaccccgacgctgatgccgcttccgatctacttggcacatcgcctcgccttccgtctgaccgaggttcgtaagtccggcgaagtgccgcacctgcgcccggacggcaagacccaggtgaccattgagtatgacgatgacgataagcccgttcgtctggacaccgtgctgatctccactcagcacgatcctgaggttacgcaggattggcttgctgttgagctgaagaagcacgtgattgacccggtgcttgatgaggtgctgggttccaaggtgccgcatgacaactaccgtcagctggtcaacccgactggttcgttcatcctgggcggcccggcggccgacgccggtctgaccggccgcaagatcatcgtcgacacctacggtggcgccgcccaccacggcggtggcgcgttctccggcaaggacccgtccaaggtcgatcgttccgccgcgtacgccacccgttgggttgcgaagaacatcgtggctgccggcctggcccataaggtcgagatccaaatcgcctacgctattggcgttgccgacccggtatccgtcaacgtggagaccttcggcaccgagcaaggcgtgacgcgcggccagatcgccgccgccgtacgcaaggtcttcgacctgcgccccgccgccatcatcgacgagctcgacctgaagcgcccgatctacttgaagaccgccgcttacggccacttcggacgtaccgacgttgagttcccgtgggaaaagaccgacaaggtcgaggagctcaaggccgcgattgctgcggagtgatatcgactagtccaagaaggggtgtttccgctgatgccagcggaaacaccccttcttgtatatgagtctagtgctcgttcttcgtctcgctttgtccatccgtattgtcggtatcatcgatgtcgaatccgcccatgagtacgaaacgcttcaacatattggtggcgcgcatacgcaccttgaacaccggcaatgccttgtgatcatgctgctcaaagaaggcttttgcccgttgcacgtcaagcgaggaacgcagtgcatcgaaacgtccgaactcgttgatgttcgcctcgtctatacgtttggcaaggaattcctcgaccaccgatctgttgacacccaatcgatcgaccagtttgtcgacttgctcgttcttctcgcgtgcagcatagcgagtgatgtaatcacgtagcgtaatgccggcttcaacctccacgtcgccacgctccacgtcatgcaggaacagttcagcgagtcgttgttcatcccgcgagagcgcggcaaaggaccggtgcagctgcgcagacatctctgccaactccgggctattctccttgagcgccttcagccatttatcgaagttggcattcatgtaatcggtatcgatgagtccggtatcaatttcggtgaggtaaccatccagttcatatggcgcttcaggattatcgttcacatcatcatctgggtcactaccgcgatcgctattgccatcgaacagttctttatagcgttgcgcaagaatgaggtacgtacgttcgtcaatttgaggacgcaccacttcagactcgccatgctcatcattgtcctcattcgtatcgtcagtatccgtgctatcgaccttgtattccgtggtgctccagtcaaagccctgcactttcgccgcttcaaggtaccgattcagttccacgaactccttggcaaacttacgtctagcctctaccgactccggcagctgcataaggtccgattctccgctgtctgagaatacgtcgagaatctcacggtaccgagtatccatggatttcacattcgctggcaatttctgtacgaacaggtcgagcggtcgatcacccgaatacagtttcacagctgcctcgatgaaaccatgcatggtgtacggcttacggtaatagcggatgacgccaaacggcttatctgggccaaacagacgattcgtacgactgaacgcctgaatgatgctttcgtagtcgataatcttatcgagatacagcgtattcacccatttcgagtcgaacccagtgagcatctggtctacgacaatgagcaaatcaagctgctggctgcggttcgttgctataccaccatacggactcttgtgcgacagtcgcgaagaaatatccttcttcatcgccggccatgtaggaatgacgaattctttgccgaacgcctcgttgtaatcggtgatgatttcggtcagcgcatcctctttgtctgtcgctccttcgttgttgtcgatattgggatcgaacaacgccgtcacatgcaacttgggtgcctgctgcttgaacaagtgataatagttgacagcttcaggaatggaactggcagcgagcatcgcatggaatttgcccgcatggctgagcaccgggaactgttcaagaatgtccgagaccaccatactcgggtgcggagagtcgataccatattggtctcgtcccaggaaatcctcgatgccactgatgcggttcccggcaccatcaaccatcggacccatggggacctcagacttatccatgtaatgctggaatactttggccttgaccgagtcggcgagcgcatcttccgcactctccgccttcgccttgtcgagagccacggcacgtctgacttcagaatccttgtacgtggtcaccatgtacgggtcgaacccgagcacattatggtcgcgaatgccgtcggcaatgctgtatcggtgcaaacagcggccgaataccatggcagtggtggaattcttcttttggttctcatccagaatgggtgtgccggtgaagccgaagaacagcgcattcgggaaggaacgacggatgtcctgcaacatgtcgccgaatgtggaacgatggcattcgtccacaataaaaacgatacgtcgtgcagccagctgatccagccacgcctgggtgacgccccgctcccctgctttcacgttgctcatcttctggattgaggtgacgatcagggtgtcgttgacattggtgctgttgagtttgtcccgcaaaacgccggtgttctcagtaccttgtacttccgtctcactgtcagcaaaactgcggtattccttcagtgattgggtgcctagctcgatgcggtccataaggaacacgactttatcggcgtcatgcgaatcagctatgagttgtgccgatttgaagctggtcatggtttttccggaaccggtagtgtgccatacatagccgcctggtcgtcccggagtagttggccgctgttcccaatcgcatttgcgcaccacgtcagagatggcgttcgcagcgatgtactggtagctgcgcagcaccttgaggcatccgtctgccgagtcggcgatggtgtagaagccgatgagctgatgcgccatgggaatggacaacagccccgcagtgccggaagtaccgccgatgaacagcttccattcgtctttgccggggttttgcccgccgcagataggctcgttgttgtagtcagcccaatggaagtaatagcttggattgaatttgtctacgcccggattggcgaagtagacggcgtcatcggggttcatggctacaaaaatctgtacgagtcggaacaggccggtgaatacgccttcgtgtgtgtacttttcaatctgattggttgcttggctgaccggtatgccacttttcttaagctcgatatgaatcaatggcatgccattgatgagaagcacgaggtcgccgcgccgcgagttcaacatcttgttcttggcgggatagaccggttgctgagcaatctgataggtgcttttgccgcctgcgatttccttgcggtcatagatgtagaggctgatttccttgccgaaatgcgccacatcttctttgttgtcacgcgtgatggacacggtacgcccattgacgaacgaattgagcgcaagcggggttcgtagggtctcaatctgctcgattatctgtgccatttccccgtctgtcagcgggtatttgccaagcctgtctatgtcgttgttgttgcggtacagtatgcctttccaattgtcgagcaaatcccgctcagttggatagcgcaggacgccatccttccatccatgctgcttaagcacggtaatgacgttgtcctcgaacaccgattcgctatcgaatatcacgattcttctctccctcggacttcccagtgtcctgcttttcgcgagccgacgcgcttgagtaatccacgcccaatgagtatttcagcatctcttcgcacagtcgctgatgaaactcccgcagcacgagccatatcctcgtatgttgtactgggattcctttccacgaaacgaagaacagttcgctgtctctcggttatctgctcacttggaccgtttaactgctcattattgtcagttatctgctcacttggaccgtttaactgctcattattgtcaattatctgctcattgtgagcggacttggcatccgattccagcataagcgtgagtatcgtacgatcagcctcgccgaatttttcctcaatccgtggttcgggaagtcctgcattcgcccatgtggcaaacacatcaggaacaccagtaccggctcgctcccccacatcgatgaggctgaacatcttcataatcagtccgttgcgcggatcagatactccgccaaggcgcatttgctcaacgcccgttcggatatcaccaggattctcgaaaaccaatttatcgggtgtgcgtctgaccaccactccacgcacgccataataatcggcgttgaacaagcagttggccagcgcctcgcgaaccgccttatgcatgggagtgtcgtcaacacgaaagataccgttaagtttgaagggggtcttcagagactcggcaagcttacgattcacacggaaaaagaaatcaaagaggttgcccgaccacatgccatcgccggaatgaacacgatcggtccaacgaatcgccgggtctagggtctcctgatagtcaagaaagtaatggggacattcgcgcacgatgtcatagtcgttgccgaacatgagcaaaccgccgaatgtgggatggagcttaccatcttcacggctcaccattgccgcaccaaccgcacgcaggaaacgctcgtcatcaagatcagtccaggaactgccctgacgtgccgcacggaaacgggtgcgatacgcccgcaccgtatccgcattgaaatcggcaacagtgagatcgtccagcaccttggaatccatcgtctcggttccctgatctcggagcattgccgaaatctcctgccgcgtgcaacgatagtcaccttcaccgcgccggcggtaggttccctcaaagagattgtcgttgatatgcacgggacgttcgtcgcgtggagcacgcggaacatgaatagccaccaccatgccatcatccgcttcgagcacttcgacttccgattcgatgggcagcacggcgcttaccttggatcgattgctgaccgtattccaaaaatcctgacgaaggtgctccacctcggctgacgtaagcccgactgtttcgaaggtaccgtcttcacgttccttgacgccgagcagaatgacgccgccataggtgttggcgaaggcggaataggtctcccacatactgcgcgggagaccgccctttgctgccttcgcctcaatccgattattctcgcgatatgaggcaagcttcgcgatatcgaacgtctccattacgccccctcccctcacacgaacatcttgtcaagcaaggatttcttgatattctgcagcaattccaacttacgctgatgaagggtgatgagggagtcaagtcgggagaagaaggaaccgatagcctgctgttcggcctttgaaggtactgttgtctcaacttccttgagcactcccacggctaaacccggctgagcagattggcccgaatatcgtcctaagtccatacaccccagaagatgagccagaaagcgcgtatcatgcaggaaatttgccttgacagctaccgcgtgttcagtgaaataggcctttcccactgcagtattgacattcccgcataacgcaccttgacgacctataagggcataaaaaccgtcatggttgtattgttttgcgtatccgcgtaaaccgttgcccccatacacggggtatggtccagatccaagtatttcttcggcagaaatgaagtcgccactttgaaactcggaggacagctcacccaacttacgctgttcccaagggtcagtaaaaccagcaaagcgaatttcgggtacagattcgccatccttcgggaacattttttcaagcatcgattttttgaagatgacgagcttgtcatacttacgctgatgaagggtgatgaggttgtcaatctcactcaacgctgcgcctatggcagcttgctccgacaagcccggaaatcttacttgtgtatcttgcagtgcggcctttgaaacggaaatcaccttgatcccctgcattaaaggaagaagctgtctgtgatatgcatcggaattaaggtagtgccccaggtagcccgtcccaaagaagaaccgaggccgcgccggtatcgtatgtaaccccgagatagttggctctttgggtaattttcgcagttcaacgcacttgccagccgcttcgtcctctgccgtgtcagcgaaaatgacatcaccttcgcgaagtatcgacccagcaaatttgggaagcacggtatcgtcggtaatgaacggcaaatcgcttcgttcgccatcgaggcaatcgccgaacttaataagaatatctccgtaatgaacattgcgagcagtgccattctcgccattcaaaccggcacgtgaaagagtgttgctcttcaagaactcgaagcaatccccaaacttacgctgttcccaagggtcagtaaaaccagcaaagcgaatcgcaggaactttcgcctgttcagtcatcattcgcctcccaacagggtcttcagctcagcaataccggccatgtcgaactcatttccggtcagctgaccaagcatattgccaagttctgcctcagcctgctcgatttgctcgcatacatcggagtaggtagtcgagtacttatcgttcaacgcattcaccgatgcaatcaactcatcaacagccgtctgaggaagctcctcaagtttgtgctgcaatggttccacccacttggcagcgagcaagtcatcagcttgctcatcgcttaatccttcaataacggcccgggtcttttcatcaagcgctgagcggagattcttaacgttctttttgacttcacgctcctcatcaaacaaccgttgcgcattcacaagggcacggtcaaaatcagtctcaggatccctcccaatcgatttcaccgctttcttcaactcagtggcaacgaaagaatctccatcctcgctgacagcatcggtcgaattcttgtcgtcttcatccagattttcaagaatgtcagcgatttcgctgctaatctcagtcaatcgggattcatatgtgccgatttctgcaaggtcagcactcagcagtttttcttgtacaaggtcgaacggcagaatatgtccggcccagccgtcctgcacttcgacatccttgccgcttttctttttgacgaccatgttggcgtcaaccttgcgaacggcgtcatggccttcgctctgtatggtttcaaggtcgttggcgatggtcttctgccagctgtcatcaagcacctgatatgccgtataggcatctacgagtggtacgtcggccaaacgatgcagcaggtcatttgccagaacttcctcctcggcggcaatgctcacgttgacggcattaccgaccagttcgccacgtagatatgagggataatcggtgaaaacctcacgataacgctggatataggcactcacaccagaatcagcattcaccgcctcacgaacatcttgcacagcgagcttagccgaatgaccattctcctccgcgaagagacgttggcgcaatcccggaaacacattccaatacttgttgagcgcatcgatgtcctgcttggggataccgccaaacatagtggaatacacgtcccaactttcggcggtttcggaggaatccacatatcgaggaatgttgaggttgtaatcgttctgccgaatctcgtcaaggctgaccaaacgactgaacttatcgacatcacgattctccgacaccgtatccacgatgcgtttgatatcgctcgcacgcagcttgttgttcttaccgtccttagcgaaatacttggaggcatccacaacaagcacatggtcatcgttgcggtgcttgcgcagcgccatcacgatagtgggaatgcccgtgccaaagaagatgttcgctggcagtccgatgatggcctgaatatggtggttctccactagattccggcgaatagtgccctcttcaccaccacggaacagcacgccgtgcggcaacacgatggtcataatgccgtcatcacgcagatggtagagatcgtgcagcaagaaggcataatcagccttggacttgggagcgatgccatattcgaagcggatatcttcacccggttccggcggctcccagttctgggagtaaggaggattcgaaaccacggcatctacaaacagcggctcataggtttcgtccttggtctcgtcggtatcgaaccacggccagtcgctctttaatgtgtcaccgttgcgggtcacgatattgtccggcagtataccacgcatgacaagattcatacgcgtgagattgtaggtattctccttgagttcctgtgcgtaatacttgatgtcattcggattgccattgcgacgggccacagcctgaccgatatggatcagcaacgagcccgagccactcgtggggtcgtagatgttgatttcttcacggccggcgagatgccaggccactatttcgctcatgagctgagagacttcgctcggcgtgtagaactcaccggccttcttacccgcgttggaagcgaagttgctaattagatactcatagatgaagccgagggtgtcgtagtcctgccggctgtccatcggaatgtccttgatgaggtagatgaggtcgcgagcggccttgctacgacttttttcatcggtgccgagtttggacagaccggtttgcagcgtgtcgaagatgccgacgaacacacgtttacgagccggatcaatgttgcgttcgaaagcggaaagcgcgtcacgtacatcagcgatggtgaaatcgccctggctggcaatccacgtggagaacaggttgttgtaggagatgaagtagccacatagatcacgtacatactgcacggtctcggcatcattctcatccaagcccttgagatcttcatctccccagtcttcagcacgcagacgagcaatctccgtctccgagaggaacttatagaagataaagccgaggatatagtccttgtattcattcgcctcaatcttggaacgcattttattggcggattcccagattttggcggcaagctgctgcttattcattcatatgctccttgtttctgtacacgtaatcaagggtctgtccttgttcattgacccattcggtccaaccgttttgactgccaccgagaacaaatacagcagcagcggaagggcttgacagttcaatgtcatcagcaagagtcgccttgcccgtctgcgttccgaaaagatgctgccgagctgccacggctccctggtttttaataactggatgcacgagatccacttcagaaccggaaagaacagtgaaacgacctgtaccttggctatatcgcccagtggcctgaacaccgttcttcttcgtatggaatacggcgttcaccataaccggtgtcttttcttttcgatcaaggtcatatccgagcactcgcatacgaaagaggatgttattgtgcagtctttccacctgttgctctttgtatggattcatgcgaggagcaggagtatactcattgtcggtctcataagagccatgtttgtccacataatctatggctgttgactcaagagagtccaaaacatcacgatcgatattgacatcattatcgaggaacatgatggctttgttccaaaaatctttcttagtcttgtgcgcatcaagccgactaagccccttcgtggtttgtcccacatacgcacggctcagaactccatgatcttcatcaagaagataatacacaccgcgatccggcaaatcgggaagacttttcgcctcactcaacatatcccggggcaccacaaccgtgacaagcgactccccatccacacgacaaattcgaatgccatcaggattgttgtcaataatttgtatggtcatagcagtgagagcaatcattacttgccgccctttgctagttcattaatcatgcatgttctcacgaatgccgaaaagctcatcccgcgaagagatgcggcctctttagcagaatctcgcaaattagcggggatacgcatagtaaccggcaccacatcaccgtttaccagatacgaacgtatctctgtttcaccagcatcatgctcaatcagatcggagtacgtcattgcattctacactttcaaactgcaatacaaatgcaataattctacacccgcttgggaacagcgtaagttaatcatggttgcaccgttgcaaaggggttttgaccttcccgctgaaaaaatcattcctggcgtatatccggttatgatgtcaaacggcatcggagcttaccataacgaatacaaagttaagggtcccggcgttgttactggtagatcgggcacaatcgggaatcttcagtatgtagagtcagcgttttggcctcataacactactttgtgggtaaccaaattttatggcaatcaccctaagttcatttattacttatacgaaaaaatagacttgaaacggtataaggccggtagtggggtgccaactcttaacagaaacgatgtgcatgacaccatggtatttttccccgcgtcaaggaaagaacaggaattaataagtgcagttctgacctaccttgacgacctcatcacccttcatcagcgtaagcgtctatctatttgtcaaaggagccccgtgtggtcataaacacaatcaacgaagaaatgtcgttctgcgattactactcgcaatgggtcgacgtctacaaggaaggcgcgattcgggaagtgacaatgaagaaatacaagctcacacaggcgtggctgagaaaacttatccctgatctcaagctttccgagttcgatcgtgtgagctatcagaaactcatcaacggatacgctgagcatcacgagcatcagacaacaatggattttcatcaccaactgaaaggagccatcctcgatgccgttgatgaaggtctgattcagagagacccaacaagaaaagcaatcatcaaaggaaaacagccgagacagaagaaggtgaaatatcttaaccagttcgaacttcatgctgtccttgctgatttgaagcttgatccgatacctaactgggactggttgatactgctagtggcaaaaaccgggttacgtttctccgaagcattggggcttactcctgatgatttcgatttcgttcaccagactttgtccgtcaataagacatggaattacaagaatggaggtggctttgttccaacaaagaatgcttcttcagtacgtaaagtacaacttgactggcaactcatcatgcagttgtctgttctgttgaagagcttacccggtgacaagcccatcttcgtggatggcaaggtatacaactcaaccgccaacggtattctggcccggcattgcaaacaagccggagtacctgtgatttcaatacacggattgagacacacccatgcttcactcttgctatttgccggcgtttcaattgcaagcgtctctaaacggcttgggcacgcaagcatgaacacaacgcaggaaatatatctgcatgtcatccgcgaattggaaaacaaagacgttgacatcgtgatgagagccttatccacccttatttagcaaaccacagacgcttacgctgatgaagggtgatgaggtcgtcaaggttgctgaagaaagagccaatttgtcgctgctcatctaaacttggttgaggaatacctagctctttgatgattgcgcctgagaggtttccctgcccaccttgaagaaaggtttcggttattgatttcttctgtctacggagccagtaagctatgaaacgatttgctgccatatcagatgcatccatggcaagaatcgcctggttaattgccccttttatcttcgaaatagcgacttctccgctggttgctccatacatggcatagagaaccattcctttatcaacaagctttgctgatgagttatttaaacccgcaaccgtaagtgacaattcggttgaatcgcaatcgatttcagcagatcggataaaaggaatttcgcctccatagtaagcagaattgccagcgctgggagtgcctcctgaataagtcagcgccagctctcccaacttacgctgttcccaagcgggcatcggcactacatgaagcagggcagacgggatacgagtggctggccgaacatacgcaatacatctaccggcaacttgggcactaccatttccgttgttagctacacttatcgcgataagtgtagctaacaacgattgaagcgacaccttacaagccatgagaggtagaaccggtccccttctattttgaaaaacttgaataagttagattttttcaaaatagggatgcgtcgaaaagacgcataaacgcacgaaaaatgcgggcatccgatatgcagtgttcattgaatcactgtatatcggatgcccgcaattgtttcagaccaattgaagagccttagctcagcatcagcctcacgccttaacaacctccacggccagctcggcgccctccttcacctcgaaggaggaggccagcgtctcatgggcgatcagatcgcggaactgctcgacatcggccacattggcggccggcacggtcagcaccagggcgatgcgatccgcgatgtccagatcagcagccttacgtgcgtcctgcacagaacgaatcacgtcgcgggcgtagccttcggccagcaaatcggcatccagcgcggtgtcgaggatcacgaagccaccggtcggcagagcggcggagaccgaagcggcggcctcggtggcgttctcctcctccacgcggttgatcagctcgtactcgccttcgaccagcgcaaggtcgccggacggcgtggagaccaccggcgcaccggacgcagcatcgacatgccagtcgccggacttggaggccttgatggcgaactgcacctgcttgccgaggcgcggacccgccgcacgggcattcacacgcagctcgtgaacaatcttcagaccgtgggcggaggcgtcctccagagtcgagaactcaatattcttgatattaagttcggacttcagcagatcgtcgtacgccttgacggcgtccacgttctcgaccaccacggtgagcttggaaagcggctggcgcacgcggatcttggcggccttgcgcagggacagggtgccggagacgacctcacgcaccttctccatcgcgtccaccaaggccggatcgtcgaccagcacacggccgagttcggtgtcttcaccggtcttctcgtccaccacgaacggccaatcggccaggtgcacggactcgccaccggtcagaccacgccacacggactcggcttccatcggggccagcggcgcaagcacgcgcatgaacgcctcaagcacggtgtacagcgtgttgaacgcggaagcgtcctcattccagaaacggtcacgggtgttgcggatataccagttggtgagcacgtcgatgaagtcggagaccgcatcgcaggcgtcggagattgcgaactcgttcagcgacttctcggcggccagcaccagacgacgggtacgggccagcaggtagcgatccatctgcggcaggccggcgacctcgtccgcgcgcagctggcgggcgttgaatccggccccaccgttggccgcgttggcgtacagggtgaagaagtagtaggagctccacactggcagcatgacctggcgcacggtgtcgcggatgccatcggcggtgacgatcaggttgccgccgcgcagaatcggcgaagacataaggaaccagcgcatggcgtcggaaccgtacttgtcaaacacgccgttcacgtccggatagttgcgcaagtgcttagacatcttctggccgtcggagccgagcacgatgccgtggcagatcacgttcttgaacgccgggcggtcgaacagggcggtcgccatgacgtgcagcaggtagaaccagccgcgggtctggccgatgtattccacgatgtagtcggccgggaagtgctgctcgaacttctccttgttctcgaacgggtagtggaactgcgcgaacgacatggaaccggactcgaaccagcagtcgagtacatcggaaatacggtgcatgtgcgacttgccggtcgggtcgtccgggttgacgcggaccaggttgtcgatccacggacggtgcatgttgatgttgccgtccttgtcgcgcgggtagtcaccgaagtcggccttgagctcttcgagagaaccgtaaacgtccacacgcgggtacttcggatcgtcactcacccacaccggaatcggggaaccccagaagcggttgcgggagatggaccagtcgcgcgcgttggcgagccacttgccgaactggccgtccttgacgttgcccgggatccagttgatctgctggttcaattccagtagacgcggcttgatcttggtcacggacacgaaccaggaggagaccggcttgtagatcagcggggtggcgcagcgccagcagtgcgggtaggagtgcacgtagcttttctcctggaagaggatcgcgcggcgttcttccggaatctcggcgagcgggccgtcgccggcgcgcaggttgcgcaggatcggcaggttggcgtcgaacacgaaatcgccctcgtagtcagggcactgcgcggtgaagcggcagccatcgtcgagcacgtcggtgctcttgatgccgtgcgcgttcagcgtattcatatcgtcctcaccgtagggagcctggtgaaccaggccggtaccttcgacggtgtcgacgtagtcggcggtgaagatcgtgtagccgttcgggccgggcacgtggccttcggattcggcctcgtcacccgcgaagtacgggaagaccgggtagtagcggcggccttccagctcggagcccttgagctcgcgcacgacctcgtagttctcgccgagttccttctcatagtgcggcagcaaatccttgccgaggtagaacttcttgccagcgaacttgccttcggtcgggcggacctcgacgtagtcgatgtcgccgccgaccacgatggcgaagttggtgggcacggtccacggggtggtggtccagaagacggcgtaggcgtcgtcctcatcgcgcatcttcacggccacggacacggtggtgtcctggcggtcctggtacacgtcggcgtccatgcgcagctcgtgcgcactcaacggcgtgcggtccttcgggcagtacggcagcacgcggtagccctggtaggccaggcccttgtcgtagagctgcttgaaggcccacatcacggattccatgtacgggatgttcagggtcttgtagccgtgctcgaagtccacccaacgggcctgacgatgcacgtagttctgccattcgttggtgtacttcagcacggaagcgcggcaggcgtcgttgaacttgtcgatgcccatcttctcgatctggtcgaccgagtcgatgccgagttccttctgcgcctcaagctcggcgggcaggccgtgggtgtcccagccgaacacgcggttgaccttgcggcccttcatggtctggtagcgcgggatcacgtccttggcgtagccggtcagcaggtggccgtagtgcggaagaccgttcgcaaaaggcgggccatcgaagaacacgaattcattctggctgtggtcgccggaagggttgcgttcaacggacttctggaaggtgtcgtccttgtcccagtagtcgagaacggtctcctccatgttggggaagctggggttcggcgcgacgtgcgcggtctcgccgccctcgttcgccttgggatatacgttttcgctcaccgtaaatctcctagttgtactgtgcactggtcctacaggagcgtcattgatggcgattgccgggcgccgacgtgtgccggctgggttcacgaatgtcacgtaccgaaccgtggggccgattgcgtcaatcgcctcgcagccggaactgactgtgttccgcccggaacagccaggtttgccgttcctgcctacgaggacgatgacgggcgctggcatgcgctccgcaccgcggtaccacctcgcttatcgcaccggttgcgccgctccgaactgttgcactcggagccgcgagcctgcgcgaccgcttgtgttcggctgtctcgggccgatcccgtcggttctactgggcgattgccgccgttcttccgaagactccccgctgataacggatcactgcctcacaacggtgcatatcgtaacacgccacgcggtcaaatcgatgggaatgttcatcaggaatgttcattctttctcatttttgtattcatcgcgtgcaccattgtcagcaaacacgctaggctcctttaccggcgatattgcacatctggctcaggggcggctcccgtatgggccggagaaaggattattgaggaatgacgtacgatttcacgtcgattatggacaggcatggcaaggatgcgattgcggtcgatgggttgggaaccgacctaggtttcgctcccgacccaccgagggacggatttgacgtgattccgatgtgggtggcggacatgaatttcccgaccgtgcccacggttccgcaggccattatcgaacgcgcgcaacaccccgtctacgggtacttctcccccaccgacgactattacaactccattatcgactggcaatccacgcgcaatggggttaccggattgaccagcgaggcgatcggctatgagaacggggtcttgggcggtgtgatcagtgcgctgaccgcgttcgccgcccccggcgacggcgtgctgctgcacagcccgacctatatcgggttcacccggagcatcgaaaacaacggctaccgcatcgtccacagtccgctcacgctggacgagcgcggcgtatggcgcatggattacgaggatatggacaggaagctcaaggagcatcacatccatgtggccgtgttctgcagccctcacaatccttgcgggcgcgtgtgggaacgttgggaaatcgagaaggccatggaagtgtacaaggccaacgattgcgtggtcatttccgacgagatttggtccgatttgactctggggaaccaccagcacatccccacccaatcggtcagcgaggacgcacgcaacaggaccgtggcgttctacgcgcccagcaagaccttcaatctcgccggactggtgggaagctaccacatcatctacaatcccacactccgggaccgcatcgtggccaaaagctcgaaatgccactacaacgacatgaacgtgctttccatgcacgcgctgatcggcgcctaccggcccgaaggccatgagtggctcgacgaactgaaggcggtgctcaccggcaacgtcgattacgcctacgactacatcaccaagcatttccaaggagtgagtctggccaaaccggaaggcacctacatgctgctgctcgactgcgagcagtggtgcgaacgccacggcctgagcctgcccgagttggagaaacgcggctgggatgtgggcgtcgcatggcaggacggcgacatgttccaggccccctacagcatccgcgtcaatctcgcattgcccttgagccgcgtcaaggaggccatgcgccgccttgaccaatacgtattcaacgcgtaaacggcatgcatccgcgattgcggtgtcctggaaagacgaatgccgtcaacgaggttggtgcccgttggcggcattcgtcatagagaagccgagccaatctaccttcacaactaatcgtcgaggctgtccacaccgagcttctcttccagctcgatgacaatgcgctcgtgcatcttttcgtcgatcttcaccgtgaacatgaagacgagaagactcagcacgatgaaggcaagcgggatgtagaacgcgaaggtctcgaaggtgcgcacgttggcggcggtcatgtcggcggcggtggcggagccaaccataccggcggccacggccacgaagccgacgatgccgttggacagcgcgcccgcgatcttgtcgagcatcggacgcacggagagggttacggcctcgttgcgcttgccggtcttgagctggccgtattcgatggaatcggtcagggagaggatcgcggtcatctggatgaacgtgccaggcaggtagaacagaatcaacgccacgatcaccacgggcaggctggccgaatcgagaatgaacagcacatagccgattgccataagtaccatgccgccgcagaacaggtatcggcgcggtatgcggcggttcagggccgggtagagcggcgccatgaccaagcccgcgatcacggggatcacgccggtgatggcgaaggcatccggcaggttaagcacgaacttgaacagatagaacatcacgccgttggtggccacattcgccactgcatacagcaggtagctcaacgccacccacagcagctggtcattttttacgatagcggcgaacgcctgcagcgggttgccgctctgatctgccctggaacgtaggacgctttcgttttccttggtgccgaacgccacggtccatgcggtcaggatgccgagcaatgcggtgatgatgccgaatgccgtccagcccgactgactttcggcgcgagaaccagtgaacatgaaactgaaagtggtcacgatcggcaccacgacgatggtgatgccgttatagccaatcgaaccggtgaacgtaccgagcgcagtatatacgctgcgttcgtgcgagtcggaggagatggcgggaatcatgccccagtaggagatgtcacgcatcgaatagaacacgtcgaggacgatgaacaccacgacgaacagcacgatgaaccaagtctggttcacgttgaccagcccgaacagaccggtgtagaccatgacgagcagcacggcagagaccaagccgccgatgaactgccacgggcggaaccggccgaagcgggtgttggtgttgtccaccaagttacccagtaacgggtcaaggaagatctctgcgatacggattatcacgataaggcttgtgatcagtgcgatgagtttggtggccaaggctttctcgacattgacgaacagcacgctggtcacgtaaacgacgaaataggtgctcagcgcgttatagaacgccgactggcctagattaccgaaagcataggcggcacggcgcctcagagtctctgctttggtaggacgatttatctggccggattcatctccggccggattcggtgattgggattcgctctccggtgactgtgaaacggacattggcattttctccttagagtcattctcggtgaggtcttctccgacctcgttggagagtgtacatcattaccaagatttaataaatcttttcactaattattgtcaatagaaccaatctcaaaaccaacgtcgcagcactcgcaaaaatcgcagaattccaacgaatacacacctctatcaccatatgaattatcgacagcgcgacacaccgccacagaaaatacctccagcaacttgcgatctgcaccatcaggctttaccataatcagtaaagagttttaccctctgaatcgacaatgtggttatcaactcaaggaaagcggttatgcagcatcccatccccaccaccatcgcatcatctgattggctcaccgatccgaccgtattcgccgtcaaccgcgaaccagcccattccgaccatcgcttctacgatcacgtaccgcagccgaacgaaacgatgagcctcaagcaaaaccttgacggcttgtggaatgtcgccgtgacgaccgccccggttttcggcttccccatgaacgattccggcaacgctgaatctccggatttcaccgcaaccgattatgacgacaccggtttcagccgcatcgccgttccctcaacactggaaaccaagggcttgctgaaccataagtacgtcaacgtgcagtacccctgggatggccacagcgaccccaaggctcccaacatccccactgatggtcacgtagccatttaccgccgcactttcgagacaagcacccccgtctccgccgccatcgaaaacaagcgccgcatcacgctgaccttccacggcgcctccaccgccatctacgtctggctcaacggttccttcgtcggctacgccgaggactcctacacacccagcgaattcgacgtcaccgaggcactgatttccggaaccaatacactggccgtggcctgctatgaatacgccaccgcaagttggctggaagatcaggacttttggcgcatgcacggtctgttccgctccgttgaactcaccgcgcaacccactgtgcacatcgaagacctgcacatcaccgccgatttcgaggcgaccacccatgccggcaccatcgacgcccatgccgtgatccgcaacatcgccgacgccaagcaactcagcgccgcactcatggatgccaacggcacgccggtctggcaggattcctatgccatgtccgacatcgtcgacacctccggcgtaccctgctgcggcaccgcagacgccgcgatcgacagcaccgccgtgcaattccgcgcgaatctggccaacattcgtccatggagcgccgaaaagccctacctgtacacgctggctctcaccgtgcgcgcagcagacaacagcatcatcgaagtggtgccgcaacgtctcggcttccgccatttcgaaatcgttgacggcattatgcgactcaacggcaagcgcatcatcttccgcggcgccaaccgccacgagttcgacgcgcgtttgggccgtgccatcaccgagcaggagatgctcaccgacatcatcacctgcaagcgcaacaatatcaacgctattcgcacctcccactacccgaatcagacgcgattctacgaactgtgcgatgaatacggcctgtacctgatcgacgagacgaaccttgagacccacggcagctggaccattcccggtgatgtggagacccctgaaaccgccattccgggcagcaatcccatctgggaaggcccttgcgtggaccgtatcgccagcatgatcgggcgcgaccgcaatcatccgagcgtactgatctggtctctgggtaacgaatcgtacgcaggcgaggtgttccgcgcgatgtaccgcttcgctcacgcggccgactccacgcgacccgtgcattacgaaggcgtggtgcatgaccgcccctttgacgacgtgaccgacatcgagacccgcatgtatgccaagcccgcggaaatcgaggaatatctgaccaatgatccgaagaagccctatatctcctgcgaatatatgcacgccatgggcaattcggtcggcggcatgcatctgtacaccgagctggagcgttacccgcattatcagggcggctttatctgggacttcatcgatcaggccctgtggcagcagctggacgacggcaccgaacgcctgacctacggtggcgactgggacgatcgtccctgcgactatgagttcgccggcgacggcctagtcttcgccgaccactctccctcaccgaagctgcaagaggtcaagcgtctgtacgctcccgtggtactgaccgtaagcgaccacgatgtgaccatcgaaaaccgcaatctgttcgtctccaccattgatttcgcgttcacggcgaaactgctggcggacggcaatgccatctggcaggccgactaccgctttgatgtgcccgccggcgagacccgcaccttcccgattgacttcccgtcggtggacgccgctggcgaaatcacctatgaggtcgatcagtcgctggcaacggcaacaccgtgggcaccagccgactatgaactggcgttcggccaacacaccgttcagtcagtcgtgccggcttccgccggaaccgattcgaccgcgtgcggcgcggttccctccacggctgattccgatacttccgataccggtacagtaacggttggccgctggaacatcggcgtggtcagcggtgacggacgtaccgaagcgttgctttcacgcacgcagggcggcatggtgtcattcaagcgtgacggtcgcgaaatggtgttgcgccgtccggcgatcacctgcttccgcccgctgaccgacaatgatcgcggcaatggcagcggcttcgaccgcgtgcgctggttcggtgccggccgttatgcacgtatagcgaatcagcagttctcgcaaaccgagactggtgtcatcgccgaatacacatatacgttggccgagccgggcgaaacccaagttgccgtgcgctatgaggtggatgccgccagcggacgtgtacatctggccgcccgatatgccggtgccaccgatgcgccgacgctgccggcattcggattggaatggacacttcccaagcagtacgagaacctgcgcttctacggccttggccccgaggagacctatcgcgaccgtctgcacggtggcaagctcggcattttcgagcgcaccgcggccgaagacaatgcaccgtatctggtgccgcaggagaccggcaaccatgaagacgtgcgttgggccgaagtgcttgacgcccaaggacacggcatgcgtatcagccaggccggcagcgaacatttcgcggcgagcctgttgccgtacagctcgctcatgctggaagaggcgacccaccagaacgagttgccgccggtccgtcacacgttcctgcgcctgttggccgcgcaaatgggcgtgggcggcgacgattcatggggcgcgcccgtccatgagcagtaccagctgcccgccgatcgcgcctacacgctcgacgtgaatctggaactgttctaacagcgataaagaagctccctctgacgagggagcttctttatcgtgctggtacgaaactgtcacgcactactagggtggtggagatgaaggtgtggtggtgcagcgtgcgccgactggagatggcctcggcaagcatcgtaatcgcagtatcggccagctcattctgatcgatatcgtaactggtcaatgtcggcgaagtgtactgggcgatggcctggttattgatactgatcacactggtatcgcgaggcaccagcactcccgcagcggtaaacgcctgcagtacgccgactgcaatcgtgtccgcagccacgatgaacgcatccggcatgtcatctcgatgatcgttagccgctttctcccctagagtgcgcccggtgtccacagtgaacgcgccttgcgcgtaaatcaggccttccgcatccagccccaaacgctcggtccaattgcggaatgcggttaatcggctgtcttccgggtattcgtgcaaacccatcgtgaagccagtaccgccgatatagccgatgcgtcgtttgcccgaggacaccaacacatccaatgcgtccaaaatggtttggcttaaatccggttgcaccgaatcgaacaggccgggcgcaggattgatgtcgatgaatacgccataaggcaataccagatggagtttcaacagttcatccgaagaaggtacggacggtccgatggaaatgaagccgtcgaaatcaccggcgttggcaatcagatcgtcgatatgggaaaacgacgtgagttccatgtgctgggctctggcattgtcgccgagcacggaccgtagttcatcgaaataggcgtccgccagttcttcctcgcgggtggcgttgtcgagtacggccacacggcgtggcaatgcgatacggcgtgatccggtagcgtagccaagctgctcgctgacctcgatgatgcgacgtcgcgtctcctctttgacagacaatgtcgggtccccattgagcagccgggataccgtggcctgcgagaagcctgatttctgtgcgatttccttcatcgtgaccatagttgagcctcccccgccccaatacgcaatactacgtagtatttcagtaaatatctttactacatagtgtaactcacgtcatgcgggtatgacgacgcatggttgcagcatcgtctacccgtagcactgatgagcacgtgcatgtttcaggccctccgataattatcgggcaggcgggaatccccagaccgtggagtcaatgcgctggattttcccggacttgtcaaagacaacggtgatgcccggcgcagtaaaactgccggtcgaatccccgaatcggtacggatcactccagtcgataacggcatgcatcgtcacggtccgagttttcgcgtcataggactcattcgagtactcgatactgttatgcgtggccgtagtcccgcccagaccgccgccattgccttgatgcatttgctgacaatacttcgtaaaatccgcgccgagaacattcgacactgcatagcgcctaaatgaacgtgttaggtctgcaccaattcacggccggcaatactccacacttctcagtaatcaattcgtaccaaaccgctcacgaatctgagcagcagtaccataagaggcttgcgcaccgaccccagtcgcggcgtacgcggaaacgtacgaggccaactgcgcactgtccgccaacgcatgacccgaggcaagtccggccagaaccgtgcccataaaggcatctccgcacccggtagtgtcgatggcctcaaccgcaactggcgcaatacgatagatatcatcaccatcgatgaccactgacccatccccgccaagcgtaattaccgcctgattaaagccgaagtcatgcatctgccgcgccacatcagaccagtccagtccatcccaatcgtcatcgtcaggctcggcgatgtccagcagctgtgccatttcatgttcattgaccagcagaatgtccgaagcctcgataagttcagcgggtagttcagcaacgaatggcgaatcgttgagcaataccttgagcccggcatcatggcagaggcgagcgcatgccgtgaccgtttccatcggactctccaaacacagtcccagtacatcggctgaggtcagattatcccgcatcgattgaatatactcaacactgacgtaagcgttagagccgggagaataaacaatcgtgttctctcctgccgcgtctacggtgatgaccgtggtcccgctggccccatccacgtgccgaatataactggtgtccacaccggtatcgttcaatgcttcaagcaaaaaatccgcattagcgtcggaaccgagcacaccaaacaatcggactttggctccaagacgagcggccgaaacagcctgattccccgacttgccaccaggaagcacccgcaacggccctcctagcactgtctcccccggtttgggcagacgctcggtggtgacggtataatcggcattcatcgagccaacgacggacacggccccatgaatgcaatcaagagaaacaagcgtttcatccatagcaggcatgatattccctttctgaatgatagatgctgctggtgcggtagtctgttcgacccgttgtctaaatgaaagtgcaacacccgttagattggaaattgcctagaaaaccagtccgaagggatgtcgcacctatgggagaagtatattcgcacctgtcggaagaggaacgccaggtcatccagatcgaggtaggcaacggcgccagcatacgcgggatcggcgcgatgctgggccgcagcccgtccagcatcagccgggagatcaagcgcaacacatggttcccgtccaacgagaacgagtcgtaccgcccgtaccggccgaaaagactgaaggcggggccatggaccggccgctactacatcgccgggcccgcgcagcgcaaggccgaccgcaggagatccaagccacgaaagccctaccggctgtcgcacgaccgcctgtgggcgcaggtggccgaatggctgggccgcggctggtcgccgctgcccgtcagcggcaggctgcgcgtcctgtggccggacgatgcgctcatgcgcgtgtgcccggagaccatctaccgatgggtctactccagcaggccgcttcgggaacgctgggcgcggtgcctgccgcgagggcacaggcggcgccgcaggcacggcggcaggaggacgtcgcgcttcccgatccccggccgagtgcccatctccgaacgcccgccggaggccgacggcaggagcgcgttcggccattgggaggccgacagcgtcatcggagtgggatgcaacctgcacaccgaggtggagaggaggaccaggttcctcatggcccgcgtcgttccggacaagaccgccggcgagagcgtcggggcgcagctggacatgttctcgccgctgccggccggcgcgcgcgtcagcgtcacgcacgacaacggcaccgagttcgcccaccacgaaaggctgcgcgacgggctgggcatggccacgtacttcgccgacccgtactccagctggcagcggggaagcaacgagaaccgcaacggcatgatccgccggtatctgcccaaacgctgcgagatacggatggacatggcaaaggaggtcagggagatcgtcgacgagatcaacaaccgccccatgcgcgtgctcggctaccgcacgcccgccgaggcgttcgccgacgaactgttagaattacaggaccaacaagggtgttgcacttctaaatagacatcgggcgatcaacatgctccgcaccagcaggcgcaatcagacattgcgttttgccgtaaaactcttgcgaaatacgaacagtacaatcatcgacaacaccgaaaccgcacacataatccagaacatgttggaggtctgcgcttccacaccactgccaacaccgaacagaccacccttgcccatggtgtcactggccatgagactggagtatacgccgactccgatagaggccgaagtgttcatcatcagatcgagaattcctacgccacgaccattctcctcgaccggcaacgcatctgacgcagcgtcgtagattggcgtatatacagcggtaacaccagcaatgaacaagcaggcaagaaaagtcagcacccagaacccactcttaatgaatatggcagatcctgcgaagccgacaatcatgagcacgatagcgataaccagtgtgcgcatgcgtccgagtctgttgattactggaccagaaacgcatccaacaattgtggccacaatgtagaccaatgttagacacagcgaaaccgtggtcaacggcacgttgtagatctgctcaccaatcacgttgtaaatcggcacacaagcaaagttgaagaagtacagcacaaattgcagcagcagaatggacatatacgcaccattggtcacgaaagaacgacccaggaacggattcttgcctttccaaatccacagcacaaacagtacagcgaatacaatcgaggcaataatcatgccgactccggggaacgagaagtaaatggcaatgagcgcagcaaataccgcaaacaacagaacgccaatggaatctatcttctcgcccttggcactgatgtctggagtgttcttaatcagcagaggaataaagaacacagataacgccggcacaaggaacaggtacttccaatcgaaagaggtgatgaagcctcccgcaaacacaccgatagcagcggccaaataatacacagcattgtaaatgccaatgtagatggccttttccttgtcattcagatatttgactgtcatcaccaggaacacagaaccagcaacttgtgcaccagcaacctgaatcatacgtgcgatgagcacgacccagaagttgaacgagccaaagaaccccaaaaagctaccggcaactaatgcaactacgccaaatagcgtcatacgcttcggggatatgaagtcgcacaatgtgccatacagcatgcacaccacaccaagaacgatgcctggtagtgtgctgatcagtgaggcacttgatgacatgccgagcgaatcaccaatgttttggaacaccagattgaatgcctgaatcatcagtgttcccaaagtgaaaacaatcagcagtgcaggcagtgcttttttggtctttgctcggttggcttcaaaatcatcaatggaagcaaccgactgtatttgttccgtcattacaattctccttattttccttagtgattcaatcgacggtggcggcaagcttcagcagtcgttccatgaattgcgaagtaaatcgttcagcatctacgccaagagctactttggtgttcttcggctggctcaataatcttgtcggatcgccgatggtacgcccaatgctcgggccttcagtctcgaccataaggtcaatcgggaaagtcgtaactagtgtcggatcaagggccacagcagcagccaatgggtcatgcaggttgcatccgccctggaatgcaggatcagtttcctcactgatatcgatgtagtaatcagtcatgtcggcaagaaatgcaccggccttagtgccgacatcgcgtagagcctgcgtatctttcttggtcatcaatgcctgcatggtcacatcaagaccaatcatcgtgatgtcggccgaagtggagaacatgcgattagaggccttgggatccatggaaatattagcttccatgtaggggttgcagttgcccggctgcgtcagcgcccctcccatcatgacgatggtgagcttgtcaacaatatcgggtgctttgacgaatgcggcgtcaatattggtcgagggaccagttggcacatagacaagctcttctttgctgtacttgcgagcggattcgataatgaaatcgactgccgacttatcagacgcctgacgtgttgccgttgcaggcacctcaacattgccggtgccattgcgaccgtgaaaaatgcctgaactgtcaggcacctcgaaagaatctgcatcactgggatgcggcacacccttaaacaccgggatatctggtcgtccgtacatttccagcaaattcatatcattacggatacccgtttccaacaacacattgccataggtaccggtaataccaatcagttccgcgtcttcggatccaaggatgtatgacaatgccaaggtgtcgtcaatgccggtatccaaatcgagaatgatcttcttcatgatgttcctttccatcagcttccttgccgaaaaatcggagacgtcttccatgaccgtctcctcacgaccaagccgaggccttgtcgccgtcacaagatttaacgttttatcaagtgatgggagtaatgataaaacgttaaatcatcgttgtcaaaatatagtcttctgcgtgtcacgcatacggacaaagaagtagtagaagcaggaaaatactgaaacaatcagccggcgacggctgcggaggggccctgcttcacagacccgcggttgatgaacatcgtgggcacggaatgggtgacgccctcatccgaagcaccagagcgaatacggcacagcagcaaatccacgccctgccgccccatcagctcggcctgttgggaaaccaccgcgatacgcggtgtcatcaaggtgaacgccgcaatgtcatcgaacgacaccagcgacatatcctcacctatcgaaaccccacggtcgtgcagcacaccaatcatcgtgagcgcatccggcgagtatgcgcacagcatcgcgcttacgccggcatcaagcaacgactcgaccgctgccgtacgcgattcataagtggagtcgcaagcgactaccacgccgttaccctcgataagcatatccgacgcaaccgcacggaatgcagtctctcgttcgttgacgctgaacgaccctaatgagggatgcgacacatatcccacgcaacggtgtcccaaacgtaccaattcctctaccgcctcacgaatgcccgtatacggattggaaaccacaaacggcaccgattcgacgcccggcacacgccgatccacgaacaccaatggcaaattacgtttaatcaacgactgcaccccgggtgactccacaccttgcggcaccacgatcgcaccatcaatacgctgcccgagcagattgccaataaacgcatcctggcgttccactgtttctgctgaagtaccaatcagcgtggaatagccccgggcatacaactcatcctccattgacgagaccaaatcggcgaaatacggattgcgcaaatcaggaaccagcaaaccaacagtcttagtatccgacgagcgcatggaacgagcacgttgatcgggcacataccccatttcctcaacagttttcagtaccaactgtcgcgtatcactagaaaagcggcctttattgtgaagtatctgggaaacagcagcagccgatacaccggcacgttgagcaacatccttcaacgtcacgaacgccatagtcccctccttgcggccgatacatcgtcaaagcaacaattcaaatgtacccttttcaccgccaatattcgcaatcctgcgccaacacacggctctcaacatagaaaaccgcaccccaaccaccggatgagaattgcttcaacccgataatcgaggtgcggtttttgcaggcgtaccggctactccagctccaccgcgccggtgtacagctggtagtactcgcccttctgcgcgatcagctcgtcatgcgagccacgctcgatgatgttgccatggtcgagcaccatgatcacatcggagttgcgtacggtggacagacgatgggcgatgacgaagaccgtacggcccttcatcaggttatccataccagcttgcacaacctcttcagtgcgcgtatcaatcgaggacgtggcctcgtcaaggatcagcgcgggcggatcggccaccgccgcacgggcaatggaaatcagctggcgctggccttgggacaggccggaaccgtcgccttccagcactgtgtcgtatccctcgggcagcatacggatgaagctgtccgcattgaccagacgcgcggcctcaatgcattcctcatcagtggcgttcagacggccataacgaatgttgtccatcacggtgccggtgaacaggttcacgtcctgcagcacgatgcccaaagacctgcgcaggtcaggcttcttgatgccggccacggagataccatcatacagaatctggccttcctgaatgtcgtagaaccggttgatgaggttggtcacggtggtcttgccggcaccggtggcgccgacgagcgcgatcttctggccgggcttggcgaaccaggtgatgccgtgcagcaccggcttgtccgggttgtagccgaaggtcacgttggtgaagcgcacgtcgccgcgcagcagggtcagtcggccgtcgggcgaggtgatcgcctgctccttggccttcatcgccacctcgcgggccgagcccttgagcttttctgcggccttcagagacctcgtaccgtcgtcgccgacctcgcgcttccatgcccagtggccggtctcgtggtcgacttcggtcatggtgcggccatcctcgccaagttccacgttcacgagcgtcacggtgcccttgtcttcctcgatgggctcatccatcagcttgaagatacgggaggcaccggcgagcgccatcatcaccatggtcagctgctgagagacctgaccgatcgggttgatgaacgagcgggacagggtcagcagggagacgagcgtgccgagggtgagcggcttgacgccggtcagaccgatgtcgttgacgccggccagcgagacggcggcgccgacgatggcaagcaggatgtagagcaggtagcccatgttgccgacgaccggcatggtgacgttgccccaggtgttcgcttcggcggacgcctcgaagagttcctcgttcttctcgtcgaaggtcttctgggtggcgtcttcatggttgaagaccttgatgaccttctggccgttgacggattcctccacgaaggcgttcacgtcgccgatccactgctgctgcttgacaaagtagcggccggagcggctcacgatcttgcgcacgatgaagtagagcagaacggtgaacacgattacgaacgcggtgaatggaatggacagccacagcatggacagcagcgccgcgaccgcggagataatcgaggagaacatctgcgggaacgactgcgagatggcctggcgcagcgtatcggtgtcgttggtgtagtggctcatgatgtcgccgtgctcgtggctgtcgaagtagcggatcggcagcttctgctggtgggcgaacatgtcgtcacgaatcttcttgagcgtgccctgctcgacggtgacgatcagccactgccacagccaggacgccacgatgccggccacatacaggcccgccatcaggctgatggcccgcagcagcggggcccagtcggagttcgactcccccaccatcggcaggatgtacgtgtcgatgagcgactggaggaacagcgcggaaccggcctgcgcggcggcaccgaccaagatgcacaccacgatggcgatgacgcgccacttgtactggaagatgtagctgaagatgcgcttgatggtgccaggctcggctttgcccatggcgggcttgcggttcttgaaactctggtcgttgctcatcgtgcttctccttccttggtatcggctgcattggcatcagctgcgctggtatcggccgtgggcatggtcactgtcaccgtcacggtttcggacggctcagcggtagatgactcagcagcctgttcggcagcggccagttcttcgggctgggcctggttcttggtctgggattcgtagatggaacggtattcatcgcaggtggcgagcagttcgtcgtgtgtgccggacgccatgatgcggccggaatccatcaccagaatcatgtcggattcctgcacggaggccacgcgctgggcgatgatgatcttcgtggtgtccggaatctcgttgtggaacgcggaacggatcagcttgtccgtcttggtatcgacggcgctggtcgaatcgtcgagaatcagaatcttcggcttcttcagcagcgcacgggcgatgcacaggcgctggcgctgtccgccggacacattggtaccgccctgctcgatgtacgtgtcgtacttatcggggaattcctgaacgaatccatcggcctgcgcgagctgcgcagcatggcgaatctcttcatcggtggcgttcgggttgccccacctgaggttttcggcaatagtgccggagaacagcacgttcttctgcaacaccatggccacctgatcgcgcagcgcctcgagatcgtagtcgcgtacatccacgccgccgaccttcagcgaaccggagctcacgtcgtacagtcgcggcacgagctgtaccagagacgactttgccgaaccagtaccgccgacaatgccgacggtcatgccggagcggatcttcaggttgatgtcgtcaagcacgggcttttcggaactgtcggagtagcggaaggtgacatggttgaattcgatggagccgtcggccatgtcagtcaccggctgtgccgggttctgcaccgtgctttcctcctgcagcacctggcagatacgctcggcagaagcctgagaaataatcaccatgacgaagatcatggacagcatcatcatggccataaggatctgcatggcgtaggtgaccagtgcggtcaggtcgccggtggtcaggcccacggcggggttgttgccggaggcgacgatctgctgcgcgcccatccatgcgatgaggatcatcgaaccgtagatgcagatcatcatcagcgggctgttgaagctcatgatgcgctcagccttggtgaagtccttgaagatgcgctgggagatgcggccgaacttggagacctcgaaggattcgcggttataggacttgaccacgcggatgccctgcaggttctcgtcgaccacgttgttcaacgcatcgtaggtgtgaaacacgcgctcgaacaccggatgcacgagcacggccagaccgcacaggccgatggccagaatcgggatgcaggccaggaacaccatggaaatcgacggggagatacggaacgagaacagccaggatacgaccaccataatcggggcacgcacgcccagacgaatgatcatcatgtaggcgttctgcaggttcgtcacgtcggtggtcagtcgggtcacgatcgaaccggtggagaaccggtcaatattggtgaagctgaagccctgcaccttctcgaactggtccttgcgcaggttcttggcgaagcccgcgccggccacggccgcgtactttccggacaggaagccggcacccagcgaaaccatcgagcacaccagcagaatcacgccgaacttgacggtggccggcatgctgccaccggtgataccctcatcgatcagcgaagccatgatggtcgggatcaggatctccaggatgccttcgaccgtcacgaacaccggagccaggatgctggctttcttgtattcacgaatcgaatggcccagcgtgcgcagtacatgtttgggcttgtccggttcgacggctttgcgcgcctgcgcgattgcctctgcggtatcgctcattcgttctcctccttcgtgttagcaacctccgctccgtcttgatcgggagccatcaccacaggtgactgagggagtgtttgatgttcaaattcatgttgtgcgcggtcgatgttcgcgcgcatgcgactgacgtagtcacgtagggctgctttctcgctttcggagaaaccctccaccagcagccgttcgacccgttcgccgttcgctttgagatcggcgacgatggcgtccgccttatcggtcaggacgatacgcttgcaacgggcatcatgcgccaccgattcgcgggcaataagccctttcttttccataagcgccagcacgcgcgaagcggtggagcgagtgatacagaacttctgttcgatggcgtgctggtagatttcacgattccggttacgagccaggaacatgatgatatgcgcgttgccgccagtggtctccttggcggaaagcggcatgctctcaccgagatagcggtcgacggctttggtcaccgcacgcatctcaatgctgagaatatgctgatccattgtcctccgtaccatgcgaggccatgcgcgtatgcgccttcaccccacattgttgcatacgcaacaattcatgataaagagacccatatacaacagttgcatatacaacaatcggtgtgttgcctagacaacgaatcccacatatgccctatacacaaactggctcccttctctgaatctcagaaaagggagctggcagtttgcgtagtattacttgctcagcttggcgtactcgtcaaccatgaactgggcgatcttcttgccgccttcgcccagcagggtgggcagcgagttgatgggcatggagttgaggaacatgcgcatcatcgcattatccggaagcttcggcagctcgccggcctcgccggcggcggccacggcggccacgatcttggcgccgaacggatcggcctcccactcgccgtaggtggaccattcggtgagcggctgggtcttgccgtcgccatcgagggccacggcaacggtgtcggcaatgtcgcgggagctcacgcccacttcgatggcatattcgccagactccacatgccagtcgttatacttttcggaccagtaggcgaacgcgcgctcatcaaggtcgatggtcacggtcttggactcaccggacttgaggaacaccttggtgaagcccttgagctcgtgcttcgggcgagccacgtcggccttgcccggagccacatacacctgcacggtttcggcagcgtccacatcggaggtgttggtcacggtggcggtcacggtggcggtgttcgcgccggtcttggcggcggcgacgtcatcgatctcgaatgtggcgtagctcaggccgtagccgaacgggtagtccacaaccttgccgtaggtgtcgtagtagcgatagccgacgaacacgccctcgccgtagtcgacgtggccttcctcgcccggccagttcagcgtgctcgggtcatcgttgatgtccagcggaatcgactgggcgagcttgccggacgggctgacctggccgaagatcacatcggcgagcgctgggccaccggactggccgagcaaccaggattcgaggatgcccttggcgtccttggcccacggagccacggagaccacggatccgttggacagcacgaccacgacgttcttgtttgcggcggctacctgttcgagcagggtgatctgcttggcgggcatgtcgagggtgtcgcggtcgaagccctcggattccgcggcttccggcaggcccaggaacatgaggaccacgttggcgttcttggcggtttccacggcttcggattcgagggccgggtcggccggttccagatcgagcgtgaagccgggggcgaagtcggccttgatgccgcgctcggcgagcgtgtcgaggaagctggtcatcttggtgggggtgatgtgggaggagccgccgccctggtagcgcggggtgcgggcgaattcgccgataacggcgatcttctggggcgtggcggacggattggcgactggaccggcgttcagcggcagaatcgcatcatcgttcttgagcatcacaatggattcaatagcggcctgatgggcgacttcatcgtgggcgtccacatcgaaacggtaattatcgatgctcattgcagcgcgggtcttgtttaccaagtcaatcatgccctgagccatacgatcgagctgggcgggggtgattaggccgtcgcggacggcgtagacaatctggtcgtcggtgtagctcggcggcatttccagattcaggcctgcattcagggaggccccacggtcatgatcggcgccccagtcggacatgacgatgccctcgaagccccattcgtcgcgcagcacgtcggtcagcagccaatggttttgtgcggaatgcacgccgttgatgcggttgtaggagcacatgatggtccacggctgggccttcttgacgatgtgttcgaaggccgggaagtagatctcgcgcagggcgcgcgggctgatgcgggcatcgacgcgcagtcggtcggtttcctgattgttggcggcgaagtgcttgagcgacgtgcccacgcccttggactgcacgccttcaacaatgccgatggcttcatgaccggccaagtacgggtcttcggaccagtattcgaagcagcgaccgccgagcgggttgcgcttgatattgacgccggggccaagaatcacagccaccttttcttgaatgcactcctcagccatcgcctcaccaaccttgtgaatgagctcaggattccaagagctggacaagccggcggccggcgggaagcaggtggcgggcacggagtcgtcaaggtcggtctcaccggtgctggaggccagggacttcctcagaccgtgaggaccgtcagtgatcatgtaacttgggatgcctttggactccacgccctgcagatgccatgcgtcgccaccggaggtgagggatgccttctcttctagggtcagatccttgacggacgggtagatggcctcgctcatgttacctctttccttgagtttcttgagttgtgcggcttgcgctgctgtcttgaattgtgcggttgttcgatatgcgttggttccgattcggccgggctgcctggctgttgttcgaggttcctccacgaatctcgactgccgttttctctcgaccaaccggttggtaggtagattatcaaaatctgtgtcacaacacgccgaaatcatttggaaccactactaaccgaccgtaaggttgcctgtatgaacgtcccctcccccaccgataccgatcgccgcaccgcgattctcgacgccgccgtcgaatcgttcggcaagctcggctattacggcacgtcactgcaacgcatcgccaccgaagtggggcttaccaaggccggcgtgctgcattacgtgggcagcaaggagggactgctcgatctggcgctgaccgaggaatacgaccgggtcaccgagtcgatcaatgccgcgatggtcgcccaggagcgcccgctcattgcggacatgtggcgtcaggtggtggcggtgaacaacaagaggcccgcgttggtgcatatgttctccacgctgagcgccgaggcgctcgacccggcccatcccgcacacgattatttcgccgaccgcgagcgccgcacggtcaccatggcgctcaacatcaactgggccgtgccggaaggcgtcaacgtcgaacatgtgctgcaggccggattctcgatgatggacggcctccagctgcgctggctgcgcgcccccggccaagacctcaacgccatgtgggccgattgcgaggatgtgctgatgcccctgcccctgtgggacgggtatcgctgagcgtcgcggttgcggctgcgattccgcctaacgcttctcatcacacagagtgggggtgttccatactgatggaacacccccactactggtttggctgtacgaacggcggtcagatatagcgcttgcagtagtcggcgatatcgcggatcacctgatgcgcctcgcccgcttcgggatcgccggcctggacgatgttgaacacatggcccagcacccgctcgcggcccttgggccatacgctcatcgcatggtccttatgccgggcgtgcaggatgcgtgccagttcataggtgttgtcggcgatgaaatcctccacgctggtgatcatgtagatcggcggcacatcgccgtccacgatgagcttgtccaaatcgagataggggttgaccttgatatggtcggcgggcgtctgcaggtagccctccatgtaatagctcagcgcgttggcatgcacgccgccctgcaaacggaacatgccggaggtcaccaccagggcgtgcacatcgatgccgaactgccgcaggcccaaggcgccggccagctgcgccgagccgttggccgcgcagagatacagggccaaggcgccgccggccgaatcgccggtcacacagacgcgctcagcgtccagaccgtattcggcgccatggtcgcggacccaatcgagcacggccatcgcatcggccagctgggcgggaaagctcaccgcaggcacaagacggtagttggtgttcaccacggcgaatccctgacgggcgagcagcatgtcacggcattcgttgttttccttgttgccgtaatataggccgccgccgtggaagtccacgatgacgggcagagccgcgccttcctctgcatccgcgggagtgtagatgtccagcagatgcgcggcgtcgccatcattcacataggcgatgtccttcaatcggctcacatcgtccggcagcacctgggaggcgagatgcgccgcgtccccggcggtcatggccttcacattggcggcgaacaggtcgcgcgcttcctgactgatcattgtcgttcctttcaatcgttatcgaaaccgtatctcagtcgcgtaccggcagcacgatggcggacggcgtggcgccacccatgtgaatggtctggtgggccacctgcgtgccggtctgttcgctccacagtccagcgtggttggtgtgtacggagtattgcgggaaatcggaagatgagatatcgcagcggatgcgcgacccggcgggcaccatccagcagatgccccacatgtcgatgctcacgcggcggatttcgcccggcttgtacggcgcggcgtccggcgtatccagcccgatcgtggtgatggaagttcggtagttgcgcgcggtgccgtccgggtccacgcacatgagcttggccgtgaaggcggtgtccggagcgctggatgagacgtacaggtccacactaatcgcgccttggatgtgcaggtcatggtccagcggctcggattcgaacgtgatgacgtcatcgcgccacccgggttccggctggatgcgtgcgccaatctcgtccatcgtggtgagcagggcctcgccgcctcgggtcatgaccgggttggccggatcatagtcgtattcggcggcgctcgcggcttgcggagcttcggccgtcagttcgccaggcttgagatagagcctgacttcgtcggcgcctgcggacggcagcggccaggagtcggcgacatgccaggaatcgctgccgatctcgtagtactcgacctgccgcatgggggtctgcttccgcttcagggtcaggtcgaaccattcgagcgcggccggcacttcggcggcgtcgagatgcttcggttccagtccttccagcggattgaggaagtagtggttccagcagccgatgcgcagccaggagtgttccttgacctgctcgttcagcgcggcgtacccggttagggcgctgccgaggtggtggtcgaaccagccctcgtggatgaacatcggcaccttgaccttggaggggatggacttgagcagtccccagaatccctcatcccagtaggcgtcggcgtccttggggtggctgatccagtcacgataccagtcaaggcggccgccccacatgtcctcgtccacgctcatctgcggcaggtggagggcggatttcatgtaatcggcgtcgaccggatatccggcgttctgcatggcccaggcggtgagcacgtcgcagcggaaggagcccttttggtaggcggaggcgaaccggtcggtgccgtagtggttggcgcagatggaggccaccttcggcgtggtgatgtccgccacggtccagcaggtcagggacaggtacgaggtgccccacaggccgatcacgtcgatccagtcctgatgttcgcaccaggcgagcaggtcggcaccgtcgttgcgctcgttgacgttcggttcccacgtgccgccggaggtgtaggtgccgcggcaccattcgcacaccatcgcgtagccgcgccgattgagatgttcgccgtgcagcttccacagctcgacctgctgcgggtaggggcaacgcaccacgatggtcgggtacgggccgggagtggccgggcggaagatgtcgaccgtcagctcgacgccgtcgcggcaggtgaccttggttgtttcgggctcggccggctcgtattccggcttgaatcgggaggattcgtactggctggtgatgttgttgagatatcgggtcatgaagtcgtctgcgtcactcatgaatactccttatattccttatatatacgtttgtctggaatcggttttgcccggcctcacttggcctgcttcgtgatttccttgaacgggcgcatacggaatccgatgaccatgcaggccgcggcgaccacgtacagggccatattgccgaccagcgacggcacataggagccggtggcgtcgaacacggcgccatgcgcggtgacggcgatggcggaggcgaccgcgccaaacatggagacgatggacaggatctcgctgtaatcgcgctggccgaaggacttgcggatgacccacggcagggcgacgagcacgacgccttggccgagtccggccatgaagccggcggcgatggccggggtgggcgtggtggcgacggccatgagaccccagccggcgaggccgatcgcggagtagatgacgatggtcagttccggcttgagatagtcgaggaggatgccgatggtggccttgccaatcgcggcgccgaacatgatgccggagacgaccagtgcgccctgttccagcgtcaggccatgggcgatttcatggctggagacgtgctggaccagcgcggccacaatctgcaggagcacggagacgagcaccagcagcacgaacgtcggggtgcggtaggccttcttggattcgatgccgggcagctcgccggcggcctgggcgtcatcggcgacggcagcggagacgatatggccgtaggcctgctcgcccttggcttcgtcggggcggaacttgaacaccagcagggagaacggcaggatgcagatgacgaggatcaatgcggttaggcggtaggaggtctgccatccgagattggtgatgaaccaggagacgacggggttgaagatggtgccgccgatgccggacaggccaagggcgatgcccatcaccatgccgagcttgctttcgaaccagttggcgagcagcacgctgggggccagggaaatcgggatgatgtagagaatgcccatcagcgcgaatgagatgtagaactgccagaccgcgttgaagaaggactgggcgaggaacagggcggcgacgcccgcgatgcacacgctgatcaggatgcgtgaatcgagcatcttcatgaccttgcccgcgaacagcatggtcacggcgccggcgatagccatgatcgacgaggccaatgcgatctgcgtgcgcgagacgttcagtgtctcgccgaggacggtgaagtacaggccaggcgtgttgacgatcaggccgaatccgaccagggacaatacgcagcagccgatgaacaccagccaggggcggctggacgacttggtttgggtggacattcgaacctccatgttcgctgttgtttcctcctgcgtgtgccgggtcggttccatcattgaatctgaccggcgaaccaaaggtaagcaagtacttacttttgttattaggtaagttactacttactttctagcgtgtcaatgcgagacacgccgggatgacggctatcatggctcatatcgcagttgggccgccgggcgcggaccatccaaagccggacgaaaggagacatgccatgggaacgcgcggagaagaacgcctcaaggcgatcaccgatgccgccaccgaagtggtggccgagcgcggctattacggcatgaccatccaggaggtctccgatcgcgtcggcatcacgcaggccgggctactcaaatacgtcaagaacaagaacgggctgctgatgctggtgctgcgtcgatacgaagattccagcgaagccggagactacattcagagcaaacttgcgcttacgcccgaacagcgggagctttctcctctgctgatgcccgagtattaccggaccatcgccgaggacaccatgaaacgcccgcaactcacacagctgtatctggtgctgcgcgccgaagccatcgatcccaatcacccggcgcacgagtactacgcccagcgtggcggacggctgcgcgcgcagatcggcagctatccgtggaagctgccgcccgaatataacaccccgcagaagatcgggttgctgtcgatgtgcgtcggctcggccatggagggcctgcaatcccgctggcttggcgagccagacatcgacttcatgtccagctggtcccagtacgaggacatcctgttccctcgcccccactggaacggctaccgctgagccggcctttcattcgggctatagccccatcgtttcgactgcggccacgatatgtgtgacggtacccgttttccgcacttcatcgaaagatttctttaccaacggttgcggataataccgcccatcacgcatacgcccgagaccgatgcaccagacctcattgcctgcgtacagtacgatcctgctattgcccggcactacgacatgtgtcacctttgacatatccatggcatcggtcaggacatctgccttcttcttcaaccattgcacatcaccatgaggactcactcgcttaggtgagattctgcgtcccctaagcaaatcctcatagagctttctaggaggaagacgacatcgcttggaatcatccagataataatccaagccacatagatgagcgaaatttcccgcgtcccaaacaatggcaagagtcagatcatcttcacagtgaatttttattgaacggccttcaagtcgctcatgatacaggagagccgcagcatgggcttgcgccaatgcatacccctttgtcttcgttatattcacggctccccctttgccgaaaaataagggagggacatctgagccagatgtccctcctgagatgaaaagccatgttttacagtcttctgcatgactatcatccactactttcgaagtggaatcggtagtggcttcggttggcctaaccgtatcacccagccactgggctaggcaccctgctttcgcggtattcatccgcgcggacgaatcaagtgccagcggcagctgacttctcatctcgaacccgcaacccaccccgccgcaaaggataggccgggtcacgaagctcattctctaccttacacaattggctcgaatcatgccaccagagagcaatttcgttctcattacaccatccaaccagcgtgccagacgtgagtgaaatcccaagggtcgaggcgtgacgtgtcggattgtgggtcgatggtaggcaagaaatcatgattaccacgtaattggtagctccaataaatctgcccggcggatgcgctccacgctttgcgctgcatggcggcaacctcgcggtaaatagagcctctgattgatgtactgtgcatagcgttttcctcggagcgaccgccatcgcccgaatgcttagcgatcatccgatttaccagattgttggccacacaccactcccccacgatcactggcgtatagcgcgctgctcggcggatacggcgttcattccagcgcacgaatagcctataacagctcatcatccatcgctccggaatcatacggaatagcggaaaatgttcggccatgatcagatagatatgcgtatcgagcatgacgccccgcatgccctcccgcacaaaccagtcccgccaacggcccagtcggaagccgtcatggaacacaatgacttggttctcggccaaaatcgggcgcaaccggcgatacgactcacggtagaaacgcttgaggaacaccattggaatcggcccactcctccgtgcttcaaagctatcctttgcctgcctgctcgatgacgacatagcatacgtcagccaatcaatcggctcattcagcacttcgatgccgaacagcgccgcacgatcacggtaccgtttggccaaacgagtcagcacatccagcgcataggcgaccgctcgcgggctatgatgccagcgcaccacgccggtgaggccgccgttgtcgaatccgttctgcgagccgggcaccgtgtgcaggtcgataagaatcttgagaccggtacgctcggcccagtcgaacgccctgtccaaatactcgatgcagcccggatgaccggacacatccccgaagataaaatacggcacaggaatacgcaccagattgcagccatgcgcggcaatgttccgaaaatcagcttcagtgatatacgtgtcgcgatgccgcgttaacaaggactcaagctcagccgattccgtagcccgatgcagccagatctcgtccgcttcgccgctggcggcaaaaatccccggcttcatccacttttccagcaccagccagttaccgaggttcaccccattgatctgctcgccaatgcccagcgtgcccagtgccattaatgtcacccgcgctaatcgttcaatgcttcgccgtaacgaacgaccagcccctgattcacacgctcaaattcggggatgtaatcaacgatgatggcatctacaagacgccgggcgcgttcctcatcgtagatatgagcagaatcattgcgatcgcgcagcatacgcagccacaacgattcgtccatgaaatcgtaatattggaaagcggttttgagcacatctcgcggagaaccggaagcggaaacagggtctccctcataagccagcagcgccttgaacagtttccaaccaagctcaaactgcaactcgaacttgtcaatgatgccgctctggatgaaatcattgctgagatcctgttcgggagccttgcgcagcgacttcagtgcggaaacgtaattctcatattttttcatacaatacctttccgctacgctcaatctccgccctcagcgatgaagaaatcggctcatccagattgatgacatcaactttaagcagtgaccacagattgtcctgaaggttctgctccaagcgattgaaatcggggcaaccggccacggcaagatcgatatcgcttttaggccggttcacaccctttgcgcgagaaccgaacagcacgaccttgcgagcgccggcatcagcggcgaacgtacgaatctgttcgtacacgttctcaataggaaccatgacgcctcccgccgtatgcagaaaatcccggaccacccgcgcttccatcatacggccgcggcccgctcaccgcacggagcccgaaccacccgaacgcggcgacgcagttgcgggaggcgggctggcgctgtagggtgtgcgggaagttcctgacgccctttttcaggaggtggatcctcatgttcaccacgttttctctggccgttattctcgactgcaccgtacgcatcgtgcttggcacggcattgggcgcactgatagggctcgaacgccagttgcgcgcccgaagtgctcggcgtgcgctgggatgtggagcacatcaccacgtccgactgacgccggccgtcggcgacgcaacagcgcaacaagccgaaaagcgggatgcgacatcgaaccgcatcccgctttgccattaccgagccgttgtctgactcatctacgccacggtgaacgtggtgcgcttcaaatcctcacggcgcgaggagtggccgatgagcagttcgaattcgccgggctcgacgatgcggttggcgtccggatccacgatcgtgcagttcgccaccgggatctcgaaggcgacggtcttggtctcgccgggctccagtgcgacgcgttggaacgccttcaattcgcggtcggtccagctgtaggaggtcacgatatcgccgatgtaggcctgcacgatctccacgccggcacgctcgccggtattggcgagggtgatttcagcgtgtacggtgtcggcttcggcaaaggtgccgtcggcattgcttgcgccgcccacgatggtcggttcgccgtatgcgaacgtcgtgtagctcaggccttcgccgaacgcgaacgccggatcctgggtgaggtcggcgtaccggtcgccgtgctggccgcggatctggttgtagtagaccggcagctggcccgcgtggcgcgggaaggtgatcggcagtcggcccgacgggttggtcagacccaggatgatttcggcgatggcctggccgccgcgcatgcccgggttcggcgcccacaggatggagccggtgccggtttcagggtcgctgacgcgcttggcgaacacgccatactcccccacgatggaggcgggcagcacctgcggcttggagctgatgagcacggtgaccatcggcttgccggtttcgcgcgagacggcggcgagcgcgtcgagcagggcgttctggccgccgagcagttcgagcgtggcggtggagcaggtttcgccgaccagctggaccacgtcgccgaccacggccacgatcagatcggactggcgggcgttggccacggcctcgtcgatcagggcctggtccacggcggcggagacgccgatcttcgggcggggctggccgtccgggtagaactcgcctgcggggtcgggcacgaggtcgatgacgttcgcgccgcgcgagtagacgacctcgcaatcgtcggcggcgagctggattaggccgtcgagcacggtggcgatcatatcgcgcggctggccgtccggcatccaggaaacctgaccggagttgccggtccagtcgccgagctggttctgggcgtcgtcggcgagcggacctaccacggcgatgcgcttggccgtgttcgcggcgaacggcagggtgccgtcgttgcgcagcagggcgacggattcgcgggcgagttccaggttgatttgctggtgttcggccgaaccgatgactgccttgatgcgttcggcgtccggcagacgcgggtcttcgaacaagccgaggcggaatttcagagctaggatgcgagctactgcgtcatcaatcagggattcgtcgagcagaccggtttttacggcttcgatggcaccctcgcagaactgcggggtggtcatgaccaggtcgttgccggccttgaccgcgtctgccgcggcgtgcacgtaatcgggtttgacgtgctgctcccataccgaacggccgacgttgtcccaatcggtgatcagcgtgccgttgtacttccatgcgccgcgcagcttgtcggtcagcaaccatttgttgaatgtgaccggcacgccttcaatggactcgtaacccagcatgaacgtaccgcaaccttctttggccacgcgctcgaacggcggcaggaaccaggattcgagcttgcggtgggagaggtccgcttcggaggcgtcgcggccgccttgggtttcggaatagccggcgaaatgtttggcgcaggccaggattgcgttctttggcagttcctcaccggccttggcaccgccttgatagcccttgaccatggcggaggcgagttcgccgatcaacatcgggtcttcgccgaaagtctcatccacacgcccccaacgggtatctcgggcgatgcacaacacaggagaaaacgtccaatgtacaccggtacaagagacctcctcggcggtagcacggccggcggccttgaccttgtccggatcccagctgacagccatgccgagctgggacgggaaaatagtggcgcccggccagaaggagtatccatggatgcagtcatctccgataatcaacgggatgcccagacgcgtcttctcattgacggtcttggcggcacgagataaatcctcggggctggtatgcagaatggatccgacatgcttattcacgatgagatcctcaagatcgccgccgcgggcgtcaagctgcatcatctggccgaccttctcttcaagtgtcatacgagagagcaagtcggcgattcgctcaccagcgggcaaatcaggattcttgtacggtaaggtttcagcagttgcggcaggcgtagtgttgtcggtcatacgaagtcgctttcctcagtgaaatcgaacagttttttaattaccaattggtagtttatctattgacagcatacaacacgcttatgccgcgcgcatcacatacaccaaaacgaccgtatgtatgcgaccccttcgttcgcccgcatacttactgccgctatcaagcacaagcatcggttcaaggcacacagcgaatcagcgatacccgtcccatatcggcgaaggaaatatcgccggctccagatcggcccattcatcgcataagtcaatggccggcccccgtaaccacctcagttgcacaccatccatgatctccagagcatggcgcaacgtgggccggacctcctcaaacgaggtgaattcggaaggcaggttccagttgtatgtcgaatagtattgccatattgaatcccgacgattggcaaactcgtcatgtaacggatgcgcaggattgaacgattcgacctgcaatatcgagaacagctgaacaagcatggggcgcgtggaattgcaatgtaccaagaacctcagatatgcgggcaatctgaaatcatcgggccctgaaccaggcaggccggaggccatgaagtcttccacactgccaaacgtgttgtaattctcgtgatacaccgcggcaagcaggttatctttgctaggaaaatatcgcaaaactccctgcttggtaacaccgaccgcatcggccacatcctgcacagaagtaccgttgtagccacgctcggaaatcagtcgtacggcggcatcgagaatttcccgccggcgttcccccggcgacttgcgaacacgcttatgctgcaatgaattcccagctgtcatatccgccagtctatccgcattctccccactcccatgcgcaaccacatccaatatccttggccggatatgcaaaacggtgccaaaacaaaacattctgtcatgccttcgacaccgatatcgcgcaatagttttttctgtatgtgcttcttcgcttactcctggaacacgtcggggtgcttcagatcgccgggaatgtcggacaagaggccctccaatcccaagaattccttccagaaatcgagcggctggccgtatggcgaagcctcgcgaccgtgggcctgaatgttggccttggcctcgaacacctcttcctcgctgatgccctcgaagtagctttccagacgttcacggtgctcaggcacgtagaacagagaggacacaatctccgtcagacgctcggcacgctcaatcggcagtgaatcccagtgacgcagttcgatgaagttcttcagacgtacgtcattgaagtgcgtggagatgatgtggttgatctcgtacgggttgagttcgcggtctgggtacacctcccccgcgttctcacggaacgccgggcgatgcagttccttggggcttgctccagaagccacagcttcaggggtatgggtcaggtcagcgaacataagcggcgtggacagcacgtcgatggcgtaatcctcccaaccatagcgatcatcgaacaggccgggcagcacattggtgcgctggaagtccagataatcccacatacgctggcgcagcagcggccatgggttcgtctcgccctcaaaatacggggtgttacggaagaagtaggccagaatcggaccgataaccgtgcccagacgcaacttttcgatggagtcgcgctcatccacataatcaatgctgacctgagtggaggcggagcaacgcatcatgcaggggccaaactgacccacgcggccgaggtagtcggtcattgcatcgtagcgatccttggggttgaccggcacatccgcaaagctggatttgggctggtaaccatagttgaccaagcggaagtcgagatcgtcaagaatcgggtcgagctcgcgacggaacttggagtacagcgtatttaggtcgctcggcttcttcaaaatgccgattgaggtttccacctgtccgccgggctcgagagaaacggcgacgccggaacggctgagacccaccagatggccgttctcccagtattccttctcctcgtcgtagtacggagccaagcgtttgagcaatgcctcgatgccattcggctcgtagtagcttacggcagtgtcgtcgctgttgtgcacgggcaggtgctcgatctccacaccgaagccaccggtgccacgctgggagcgaccgttctcaaagaacttgagcaggctctcgacatgcttggggttcggcttggcgagtaggtgcgcgtaactgattcggggagtaaccatgctttgtatcgtattcgagccggccggcgcgcgtgcccgaaagcccgcaatacgctatacgaaaaaccgatagcaggctccggcccggtttctcgctctagagactcccctcagtcgctgcgcgacagctccccccatagaggggagcttaagtgtatgtgcgttcagtccgcggaggtgaagccctgcggctcgccggtctcggcgaacttggcgttgtgggccttcttggcagcggcaatcatcagcttgatacggttgagctgattggcctcggaggcacccggatcgtaatcgatggagacgatgttggcttccggatgcagacgacgaatcttgccgaacatgccacggccggtcacatggttgggtaggcaggcaaacggctgcgcacaaatcacattcgggcaaccctgttcgataagctccagaatctcagcagtcagcagccagccctcgccggcctgtacaccgatggaggtgacttcagcagccttcttgacaagctcgggcatcggctcgtcctgcttgaacttgccgtgcgaggtggccagtgcggccttgataggcgcgttgtacaggtcaagacccttgcgcatcaaggcgtagagcgtcttgttgccacccatgccgaggttcttctcattccagtcggtgatgtaggggcgggtggtcatgaattccatgatgccgggcactacggcctcgcaatcctgggattcgatgacgtcgaccacatggttgttcgcgtccggctggtacttgacaagaatctcgccgaccacgccgacacgcaccttgcgcggaatatcacgcagcggcaatgcatcaaaggatttcacgatctccttggccagcacgttatacggcagatagcccttcttgatgctcggcgtcttggctgcggtcttggaatagccgtgatgctcgatggtctcacgcacgatggtgtcccacagctcgtacagcttgttggccgaacctttctccacctcatacgggcgtacgcggtagaggcacttcatgagcaagtcgcccagaatcagcgccttgatggcacggtgcagcaggggcggggtggccttgaagccggggttgtcttcgaggccctgggtagaaatggcgatgaccggaatctgcggatagccggcatcgaccaaagccttgcggatcaggccgaagtagttggtcgcacggcacatgccgccggtctgggtgatggcgagcgctacatggtcgggatcgtacttgccttccagaatcgcgtcgatgagctggccgatgaccatgattgccgggtaacaggcgtcgttgttcacgtatttgaggccggtttccacgtcgccgcggctcgcgtgcttcaggatgtcgaacttgtagccgccggagcggatgaccgcctcgaccaaggacatgtggatcgggctcatctgagggccgacaatcgtatagttcttcttcatgtccttgacgaacttctcacgatgcgcgtatcgggacatggtggcgttgttgtggccggacttcttggcgttcttggcgttcgtcacaccagtagtgccgtccgaagtgccgttcttgctggcgactgcggcctgcaggtcgcgttcggcggcgcgcttggaggcggcgcgcatggccttggtgagcttcgggttggcggccatggtgctgtcaagcagaatctggcggccgggggttggcgcggtggagccggtcttgcggaatccggtggacttggggccttgcacggccttcgtcgcggcggcctgggatgccttggccgcggcggcttcgcgggccttgttggcttcgcgttcctcgacggcggccttgagcgagcgcagtcgaatcttggctgcacccaggttggagacctcgtcaatcttgagcagcgtgtacacgtccgccttgtcggccagaatctcggccacctgatcagtggtgatggcgtcgaggccgcaaccgaaggaattgagctgcacaagctcgaggcccggatacaaggccacgaagtgtgcggccgcgtacaggcgggagtggtaggcccactggttagtgacgcgcaacggcatcttggtgaccgtgcggtctcccacgtggcggaatccggcggcgttcttggaacgcggatcggcctcgccctcggaaaggaattcggtgaggttgagcttctcccccggctgcaattcgcagatggaatcctcggagagtaccaccatgccgagcgagcagatggtttcggggatgccgtggttgatttcggggtcgatgtggtagggacggccggcgagcacgatgcctcggcagttgtgctctttcatataggcaagcgcggtcaaaccttcctgctgcacgtcatgcttgaagaccttgtcttcggcataggcggcctcgaccgcggtttcggcctcttcgcgggtcacgttggcccacgcaaactcttcgacgatgcggtcaaccatgagctcatggttggcaaggttgaagtacgggtgcatgtaacgcacgtcatcctcgcgcagctcaggcatgttggcgccgacgacgagcggatagttggccacgaccgggcagttgtagtggttgtccgtgttgggcacgaggttctcctcgtagctcacgcacgggtagaagatggtcttgacgcccttgtcgagcagccacttgatatggccgtgcaccagcttggccgggtagcagatgttttcggaggcgatggattcgatgccggtctcgaacagctcgtgggagctgcggccggagatcatcaccttgaagcccagcgaggtgagcagcgtgaaccagaacgggtagttctcgtacatgttgagggcgcgcgggatgccgatttcgccacgggtggcggccttgtcggtaagtctgcggtaggcgaagcaacgcttgtacttgtagtcgtacaggttcgggcggtcggagcgcttcttcttggcgtcgccgccgcgttcgcagcggttgccggtcacgaagcgcgagccgtcggagaacgtggtgatggtgagcttgcagtggttctggcacagcttgcacacgtcacgctcggtggtcatgctcatgttgtcgagcgcttcgccggtcaggatggagctggcggtgtgggccacgccgtccacgacaacgacatggacctcaggcttggccggctcggtcttcttgaaggctgcggccttgggctcggacttgggtgcgggctcagcctcggactgttcctcggacccatcggccttaaccaccacatccaagtggtcggcctcatcctgatagtgcatgcgggcggtcagggcggcgccgaacgcgcccataaggccggcgatgttcgggcgggtgacctgacgttcggtgagcagctcgaaggcgcgcagcacggcgtcgttgaggaacgtaccgccctggaccaccacagtgtcgccgagttcgccggaatcgcgcagcttgatgaccttgtacagggcgttgcgcaccacggagtagcacaggccggcagcgatgtcctcgatggaggcgccttccttctgcgcctgcttgaccgaggagttcatgaacacggtgcaacgcgaaccgaggtccaccggatgggtggaagccagagccttttgcgtgaattcctgaatcgtcaggcccatggacatggcgaaggtctgcaggaacgaaccacagccggacgagcaggcctcgttgacggcgattgaatcgataacgccatcggtgatggccaagtacttcatatcctggccgccgatgtcgatgacggcggtgacgccggggctgaccatttcggcgccacgatagtgggccatggtctccaccacgccctcgtccaagtgcaggccggtggtgatgaggccttcgccgtatccggtggcgcaggagcgtgcgatccacgcgccttcgggcagctcagactgaatcttcttgacgatgttgatggcggcggtcagcgggctgccttcgttgttggcgtagctggaccagacgatttcacggtcgtcgttgacgagcgtggccttgatggtggtggaaccggcgtcgatgcccaggaagtgcgggccatgcgcgccttcgagggtgccgatgtggatgtgttccttatggtgacgcttgttgaagtcctcgcggtcggcctcggtgggaaacagcggcggcatggtgggcgtgttggagggcaggttcttcagctcgtccaaacgcttcaggatttcgtcgcaggtgtaggcctcgaaatggtggccctgatcgtcggaatccgtgtcggcctgcaatgccgaaccgtaggccacatacaggtgggcgtcggtcggcacgatgaactcgtcgaccttgccttcaagggcacgctggaaggcggcgcgcagttcggacatgaagaacagcgggccgccgaggaagatgacggtaccgtggatcgggcggccagaagccaggccggcgatggtctgcgtggccactgcggtgaagatggaggcggcgagatcaggcttggccgcgccgtcgttgatcagcggctgcaaatcggttttggcgaacacaccacaacgagaagcgatcggatacaggttctcgtagctcttggccatctcgttaaggcctgcggcgtcagtgtcaagcagcgtggacatctggtcaatgaacgcgccggtaccacctgcgcacgaaccgttcatgcgttgttcgggcgtgggtttcaggtaggtgattttggcgtcctcgccgccgagctcgatgatgacatcggcctgcgggtattccttgtcgattgcctcggtttcggcgatgacctcctgaatgaaaggcacatgcagattgtcagcaagcgccagaccgccggaaccggtgatagacaggcgaatcggttcatcgccgcgtccgaggtccacaagcttcttgtggatgtcgaccaacaggccggccacggtggcgcgcacgttggcgtggtggcgtcggtaatcggagaagagggtgtctcccagggaatcggactgatcaagcaccacggccttgacggtggtggaaccgatgtccaatcccacacgcaggggcttcgggtgtgaagcgggctttacgctcgcgtcagtggcgatgtcaaccatgtgttcctcttaattccgacttccgggagtgcacgctttgaggcatcatgaaccgtttcgggacggctggcagataccctgcggacggcttcgcccggctacttcttatggaatattagtccgaccacctgcccaacatggcacgaggcgaggcgatttcgctcacgggaaggccttttcccaacagttccaacgatattgctgagtgcggcattccagaactgctactacgaggcctgttggccttcgccggcttcgcggtctttcaaatagatttcggggatatctcgttcttgatcgtggagcttggcccagatgaccggttcgccggcttccagagacttgggcacatcgaggatgcgctggtttctggagccgcggaattgcagcagcgagtccttctggtctctgaggtagcggccgtcgacgagaatgtcgatgagatgtagcaattcaagcttgtctggggtttctccggggcgcatgagttcttcccatgtgtagccggtccacgaccagatatctttggtatgaccgaattcctggcggatacgttgtgcgagcggcaccagcacgggagtgttgaggaatggctcgccgccaaggaacgtaatgccttgcacccatggggctttcagatcttcgatgattttgtcttcaagtttttgcgtgtattcgtggccggcttggaaatcccagatggaggcgttgaagcagtcgacgcagtggaaggggcaaccggagacgtaaagggagttgcgcacgccttctccgtcggtgacaatgaaggttttgtagtcggcgatcatccgcttggacatgcgccggccatcccattgaccggctttcggatcgttggcaagaccgttggagggtacggaggggccacgcccggtctcgccggccgcaaagtcatggcgcttgggttcgggcttggtcgtatgcagctccggcatgattccctccttacggaaagcattagctcccgctggcgggagctgtccgtcatcagacggactgagggtggtcaacaccataaaggatgaccgccctcagtctcgcttacgctctacagctcccgtcagcgggagcaagtataaaccctacttggtctcttcgaaccactcgcgagtggttccgtcatccagcgtcacacgaccggtttcgccgctcatgtgcttgactcggtgggcgatttcctcgtgacggccgtgcaccatcgggcgctggaccgggctgccgagatagccgcaggtgcgcttggtgacgttgcacttgtccgggttggagttaccgcactccgggcacttgaagccttcctcggtcggctcgaagtcgccctggaagccgcacacgaagcagtggtcgatcggggtgttggtacccaggtagccgatgccgatgttgtaggcgtaatcccacacggcttcgagcgccttcgggttgtcctgcaggcacgggtactcgcagtagttgatgaagccgccggaagcgtagtacgggaagtccttctcgtagctgagcttctccatcggagtgggctgcaaccacaccgggtagtggaaggagttggtgtagaagtcgtgatcagtcacgccttcgatacggccgaacttttcacggtccatgcggttgaagcggtcggtcagggattcagccggagtggagtacacggaatagtggtaaccctccgctttgctccactgcttgcacagctcgttcatgcgcttgacgatggacagcgcgaactccttgccttccggatcccagccgtggtcgcgaatccagttcttgccatagaagaccgcagtggtctcggcaaggccgatgtagccgagcgacacggtggcacgctcgttcttgaacagctggtccacgttgtcgttggcaccaagacgaccaaacgcaccaaagcggaacagggtcggggcgttgaccggggtggcttccttgcagcgcatgatgcggaactggagggcctgatgggcgacttccatacgctcgtcgaacagcttccagaagcgagccttgtcaccgtgggattcgatggcgatacgcggcacgttgacggtgaccacgccgaggttcatacggccgtcttcttcatccttgccggtctccgggttgatccaaccctgcaggaaggagcggcaacccatcggagccttgaaggagcctgtgatcttgacgatgttctcgtagaacaccacatccgggtacatgcgcttggtggcggactcgagggcaagctgcttcagatcgtagttcgggtcacccgggtcggcgttcacgccgtgcttcacagtaaagacgagcttcgggaagatggcggtgtggtgttccttgccgaggccgcgaatacggttcagcaggattgcgcgctgcacttcacgagagaaccagtcggtgccgagaccaaagccgacagtcacgaacggggtctggccgttggacacacggttggagttgatctggtattccatggtctgcatggcatcatagatggccttgcgggtacgaatcttggcgaggatttcacgctcttgctcaagttcgtcaacgtcggtgtggaacggggtgtccatcggcagcggttcacgggaaccgaaatgcagcttggcgggctcgttcttcttggcgctctcgacctgacgacgggcgaattcaaccggcatgccgtcggggatggtctcacgagcttcctcaaggaacttctcgtaatccttcttggcatactgggcaagatgctcgtcggcacggttggcggtctggccaccatactggctggaggccacgtccttcatgatctgggtaatctgggtggccgcaatggcgatggacttcggggaagccatcggagcgttgccaagagtgaagccattggccaacatgtcccagaagttcggcaaggagcagttggactgggcagtgaacggcgagtagtcggcatcgtggaagtgaatgtcgcccttcatgtgggcgttggacaccgccggcggcagcatgttgaacgcggcggccttggacacggcaccggccagcagatcacgctgggtggagtagacgttggaatccttgttcgcgttctcgtgaatcagggtcgggtcgtggttgatgaagcgagcaacggcctcgttgacatcagtggccttggcacgctgaatgtctttgtcgagacggtaattggtgtaggcgcgagccacatcgtacaggtgggcgtcaatgaggacgtgctccacgagattctggatgtcctcgatcttggcggggccggcgtaacgctccttgatttcgccttcgacttggttggcgaaaccacggatcatggcatcttcttcggggccgacttccttgttcaggtcaccgaaagcagacttgaccgcagagatgatgttgatggggtcgaagtcgaccacacgaccatcacgcttctcaacgagcacggtggaggccttggcggccaccttggtctcgttataggtgacggtttcctccagcacctgtgcgcccatcgggcacccctttcctgtaaggcgaacactctcctgagttccgcattttggccgcactcgacgtgggccacacgaaattatattgatgtcgttttcttgaacctctagaagaatacggcatccccacccctatatctagtgctcaacagtggtgtgtcgaactatttatagggttttcggctattttccgccaaaatcacaagtgtgtgattagcgtaactgttttctgctcgcgtgtcgtacagcgagctcaccgacgactctcaaccgtcagcgcaacgcatatctcactcctcttcatagcacccgtttcttcgccataatgactcctttcttctgatgcaccagaccatctccatcatcggctgatacatcgcttcgtacggttcttgcattcatcatcacaccgttttcaggcgacggtaaatttttaccgtcatcaaccaacgcacttatagtggagtgcatgactactgcaatgggctacccatctaccggccgtccaccgaccgccgcttcactggcctcggctggctttgagccgggtcaaggcactttcgcgcccgatcggggcgccatcaatctgccgaatgagcctcgacctatcgatcagctgcctgcacgcgccgctgaaaccaccgcgcaaaatccatggccggtaagcgtgctgagccagaagttctacggtgccgtggaacgatggccgtccgcgtgggtcaccggccagatcacgcagatcaatacccgtcgcgccggctcggcctacatcacgctgcgcgacgacttcgaggatatcgccatggaagtcaatggcttcggcaggttcgcggccgcggccagccagttcgttcagggcgaccgcgtggtgattcacggcaaaccgaacctgtggatgaagcgcacttcgctgtcgttgcgcggggacacgattctcaaggtcggagccggtggcagcctcaaggccatgatcgacgaattgcgcaagcagcttaagggcgagggcctgttcgacgccgatcacaaactgcctctcccggagtttccgaagactattggcctgatttgcgcacctcaggcacgtgcggaaggcgatgtgatcaccaatgtgaaccttcgttggccttccgtaaccttcaaggtggtccatgtgcatgttcagggcgagcaatgcccggccgaggtggttcaggccattgcacaactcgatgccgacccgagcgtggatgtgatcatcgtggcccgtggcggcggctcgtttgaggatctcatcggtttctcggatgagcgtgtggttcgtgcggcgtatgcctgcaccacaccattaatctcctccatcgggcatgaggatgactggacattgctggatctggtcgccgatctgcgcgcctccacccctaccgatgcggccaagcgcgtggtgccggatgtgcgtgagcagtcacagctcatcgaaggtgccatcgaccgtatgcgactgcgggtccgttcgcgcgtggagaacgagattcgacttatcgagggatatgcgaaccgcccgagcctgacacagccgcacaccatgcttgagcctcatcagcgcttaattgacgactcgttgcaacggctcgatatcgggctgcgacgcatcgtggacgatgcccagctcaccgtcgagcgagctcacgcctcactgaccgcactcagcccgcaatccacgttgaaccgaggctatgcggtggtacagtccgccgatggccacgtactagacgatgcttcgcaggtaagccctggggatggcatcaccgtcaccttgaagaagggtgtcattaccgcaaccaccacatccgcaaccgcgtgacacgccatacgcagccacgcatatataccgtatatataaggagaacatcatgaccgaaaacgccacatccaccgacaagaacacccccgcctcgtccctgacggacaaggaacgcgagctcatcgcccagatgccatatgaggaggcgcgcgacaagctgattcaggctgtccaggcactggaaaccggcggcctcaatcttgaccagtcgatgcgtcaatgggagatcggcgaggccttggctaagcgcgcccagggtctgctcaacgacgtccgtgccaagctcgaccaagcacaagccgagcaagccgccaacgaagccaccgcaggcacgcagtccaacctcgactgagttgcctcccggcgcggcatcccgcggctcgcacctgagtccggactggactgagttctgcttcccggcatacgatagtggtgattaggccacattggcagcagtttatagaagggaaatcccatgtcaacgttgattcttgtattccatccgcatcttaaggacggctcgcgcgtgaacgcccgcctgctcgccgaactcgccgcacagggcgaggacgacatcatcgtgcgcgacgaatacgccgaatacccgaacttctccgtcaacgccgacacggagcacgagctgctggaggctgccgaccgcgtaatccttcagttcccgttctattggtactcctcccccgcgctgctcaaggaatgggaagacgaggtcatcaccgccggctgggcctacgccggagcccatgcgttgaagggcaaggagctcaaactggtggtcaccactggttccgacgccgccaagtaccgcaaggacggcgagtacagccacaccatggaggagctgctaagcccgtttgaggtcgtggcgtacaaggtcggcatgaactatgctgagccgttcctggtgcagggcaccgccaccatcggcgatgcggagctgaatcaggccgccgccgattatgtttcggcgattttggactgaataagctgaggccgggtgcaagtcgcacccggccctgttgtttttttcgcgggcaagccgcggggtctctccctcagtcagcttcgctgacagctcccccgtcagagagagcttattttttggatcagagggagttgatggttacttcttcagcgggacgtagatcacgttgtcaatgagctcgcgatagtgctcaatgatttgcgcgcgacgggtcttcaggctcggggtcagcatgccgttggcctcggtgaattcgtcgggcagaatctcgaacttacgaatcgactcggcgcgggaaacgccctcgttggcggcgttcaccgcacgctccacctcggcatgaacgatggcgttcttggccagcgaggccagatcgggttccggcttggcgccctgggattccagccatttgttggcatccgccagatccagcgtgaccagagcggccacgaacggcttcttatcgccaataaccaagcactggttgaccacaggcgaggtcattacggaagcctccagcagacccggcgacacgttcttgccaccagcggtgatgatgaggtctttcttacggccggtgatggagatgaagccgtcttcggagatatcgcccaaatcgccggtgtgcagccagccatcggtgatctgctgggtggtgacctcagggttgttgtggtagcccctgcacaccagcggtcccttgaccaccagctcgccgtcctcggcaatgccggcggtgataccgcacatcggcatgccgatggtgccgatgcggttgtcctctggcaagctcacacacaccgggccgcaggtttcggtcatgccatagccctcaagcaccggcatgccgatgccgttgaagaagtgggaaagctcggagtccatcggagcgccgccggtgatggcgaagtcggcgttcggaccgaaaatcgtgcgaatcttcttgtacaccacctgctcgtagaaggcgtgggcgatgcgtccggtaatcggcagctgctcacccttctgctcggccttggaccattcgcgcgcgttctcggcggcgcgcatgaacatcttgccagcgaatccggtgccggcgcgctgggaggcggcattgtagaccttctcgtacacacgcggcacggcaagcagcagcgtggggccgaaggtctcgaagtccttgaccatcgtcttcatattggagctcagggccagcgaaatcgtgccgccgaagctgaagaattccatgaatcgggcgaacacgtggctcaacggcaggaacagcagcaggcggcggttgggccatgcgccggcgcgcggcatgtactgcaatgcggagagtaccaggaaggcgaagttgcggtgggtcagttccacgcccttcggggtgccagtggagccggacgtgtagacgatggtggcgcggtcgtcgccgtgggaggcttccttgtattcccagaattcggcgtcggtgacgctttcgccgtaggtcttgatggcgttcagaccgccggcctcgattacgaacacgttgcgcagggtgggcacctcatcgcgcacggattcgatcttgtcacgctgcccgtcatcttcggcgatggcgagcgtgactttggaatcgttgaaaatccagctgacctggctggcggagttggtctcgtacaccggcacggtgagcgcgccgatggacatgatcgccatatccagcgcggtccattcccagcgggtgcgcgagacgatggcgactgaatcgcccttgttgacaccaagtccgatcaggcccttggccaagtcgatgaccatgtcacggaatacttgggcgctgtacgggtgccaagtgccatcatcgcccttgtattcgatcatggcaccttcgggatcgcgcttggcgcggttatcgagcagatcgaacaggttgatgtcgctgtcaatcggctccttgacgggattggtgaactgcttgacgatacgagtatcgtttatggccttatcagcgatgttttcagtcatactccccatgtaactccacggatgctacaaaacacgcgcgaaacaacggattgtccagaccaaatggccccggcaatccgttatttcgggcaagccaggtaaatctgtcgcaccgtacattcagcagattactcggcggagttattggcctttttcagctcgtcgcgaatctcctgcagcgtggcgagagtctgctcttcaacgctaggcccctgttcttcagcgtcagcctcatcctgggcagcagtgagatcacgaagcttattaatcggcaaaatcacgcagaaatacaccgccacgccaacaagcaggaagttaatcagcgcgttaagaatcgcaccaaatgaaacagtcgagttgttgaacgtgatggtcagcagtccggaaagatccggtacgccgccaatcatgccgattaatggactgatgagattgtcgacgatggaattgaccacagcggtaacggcagagcccatcaccacacctaccgccatatcaatcatcgatccgcgcgacaggaatttcttaaagccattcaacggacctttatcggtcaaagcaacaactttgcgagcggttcctcccgtggccttggcaaagtcggtggcaatattcatgggattgtggttactcataacggcactccttacgaaattcagacacttcacttgtatccgactggttttcccacgaccccattatgccgcttgttggaatatccctataccactgcggcgttcccgtacatgactatgtacgagaacgccgccaaccctgcttgcagagaacctgttagagctgtttagaactggatgtaatcgacttccgtatgctcgccggtttccaagtatttcgccacatcatcaggaccgacgaacaccagttcgaccgcttgcgcaatcatcagattgacacgatccattggcgtaaggttttcgaaatagccgtacaccgggattcccagcgcatgcgcatatccgatttcgaacatcgtgcccgggtcctcgtccataagattggcgaccacggctttagcagcattaatgccatggatatcgtccgcaaagcatccttcagggcctacttcttcgatctggctgacaaaccgcggcttgaacagtaccttgccatggtcttccaatatcttttccaaacgttccatacttgccgtttgttcaggatcaaagaacggaccggccacatagaagtcatactgtttgtcttcactcatggtctctagtcatagcgcagcaacgtcgaacgtcagccgttattttcactgtatggacaaggggtcgtattgtgaacattgctacgggataaccgtcaacgactacgtacgttgcccacgattggcgcatgccgccgctcttgcgccgtccgcactgccagcccgtcagccacgattgacgatttgcatggcgcggccatcgtccatcaggtggaagccatgcttctggtagaacggtgcgtttttgctttcctcaggcatgacttccagcaagaagtagtcgcgatacttagccttgaccagttcaacgagatggctgccgatatgctgcccgtgatatgccggatctaccagcacccaatgcatataggccaccatttcggtatcgtcgagcacgcgaaccaagccgaccaaatggccgccatcccatgcgctgatcaccgtatccgaatgctgcaatgccttgaacaaccgttccggccactgcgccgattcccaacctaccgacttgaacagcgcctcaacctgctcaacagtaaaccgcttctcttccgtgtattcgatagccatggaccctcacgacaaccgtgaagccccacatgtctttgcatagtttcacacgacgggatgatggatagtggaacctatacgtttacacatgcctaatgcccatggctcatcaccgatgaatagaggctgagataccgtcatgtttccgaagccaagtgcccgagatcggattcgaaccgacgacacccgctttaggagagcggtgctctatccactgagctactcgggcaacgacgtttcattgtacacggccacacgcccagtcgcatcatgttcgcgtggcagcttgcgcaagccatccggcaacctgagcaagccacatggaggaacccgacatcaggtcatggcccggtctttcgtgccagtttggtgcgaactgctcttgcgcacggcgaaaagacactgaaagacaagccgtacacggtacagtggcaaatcgcacgaaaagcaaagtaacagtaaacaagccggaggaaagggcagcatggcaaaggcacggagtactaccacaggcgcaagcgtacgagctcgcgccgctgccaagccacgctctgccagagccacggcacgcccagtatccaagtctgccgtgaagccacacaaacggcatcgtctgcttggttttctcgccacgatgttcgcgcttcttgcccttgccggcgctgccgcccgcgcgctgcctgccgatttacaggaactgccatttgcgccgattgtggtatcggcaacgccatggttcacgttgcttggcttgattgccctgctgttggccatcgtgtcgcggcgtatccttgccgcactaatcgccatcgccgcaatcgcatgcaatggctattggcaatatccgttcttctactcgaccgatccactcccccaagccgcgcagaacgccgtggccgcagcctcccccaacaccagcgatgcctacgcgcgcgtcatgaccttcaatgtgtataaggggcaggccgacccgcaagccatcgtcgagctggttcgcgatcagcgcgtcgaagtgcttgctttgcaggagaccaccgaggatttcgtcaaaaaactcaatgaggctggtattgagcattatctgccgtatgcgcaggtctcatcgtctgacggcgtattcggtaacggcctctggtcggccacgccacttgccgatccgaccgacgatgacgtgaattccagcgcctcattcatgcccggcggcacggtggatatgggtggccagcagattcgattcgtatccgtgcacaccaccgctcccgtacccggctactggcggcagtggaagcgatcgctggatgagttgggtctgatgcgcgagcatacggatacacggtatattttcatgggcgatttcaacgccacttacgatcacacgccattccgtgattttcttggcgaccggttcgtggatgccgcacgtgaatccggacatgggtttacgttctcatggcccacgaaccgtgcggctgtgccaatgttcgccggtattgaccacgtggtgcttgatcagggcatgaaggccggacaatgcaaggtggtcaaagtcgagggctctgatcatgcggcattgttggctaccgtggcggttgggtgattcccctcaataggactagaaaccgaggcgggtgcggccgaattggtcgagccagcgcaaaatcgcgccttcacgcagcgcccacgggcagatctcgacttcctgaatattcagggccttcatgatctcgtcggccaccacgccgccgcccacaatctgcatcgtgcgttcaggcgtgatgccgggcaaagccacgcgctgctcaggcgcgatcgccgccaaacgaggaatccagtcttccaactgctcacgagtcataatccatgaatcttcgcggcccggcgcacgcatcaccgcaccgcacaggcgagccagcgagcggaaggtcttggaggtgccaactgcatgattcgggtgcttggattgcgggaaaaccttgaccatcggctccagaatcttgcgcacgttcttacgcacgtcttccaactcgtcgggcgtggccatgccggaaggcagaaattcagtggtgacgcggcccgcgccagccggggcggaaagcgctacggtcggctcttcgtcggagcccatcgccacttcgagcgaaccgccgccgatgtccagcaccagcagtcggccggcatcccaaccataccaacggcgggcggccaggaaggtcaggcgagcctcatccgtgccagacagcacagtgacgccctgaccaatcagttcctcgatcttgtgaatcactttgttgccgttcggcgcctcgcgcagggcggaggtggccataaccagcagctgggtgatttcgtattcctcggccagccgcatgcactgggacacggcttccagaatcgcctcgatgccggacttcttgattgagccgtcgtcctttaaatacttcatcaggcgcactgtggatttggtgctggcctcggggtcagggcgagcgccgggggcggcgtcgacgataagcatgtggatagtgttcgaaccgatatcaagcacaccaagtcgcgtggtatgcgaacgcagattgaccatgattcctattcctgaccttacctaacccgtgatggccgaacaacgggccgaccatcgcaatcagccagccgtgcgccaccatggcgagtcgttcggccggcaaccaacaccgtgaggccagccgaacatcacacaaactcgactactgtacaacaatcacaccggctgccgcgccgttcacagcgattcgacgaacgttccgagacgttccagcccctcggtcagggcctcacgtgaggcggcatagctcaggcgcacatgcgtatccgccgtggccgcgccgaagtcgcggccaggagtcagagccacatgggcttcatccagcgcgcgttcgcagaacgtccaggcatccagaccagtgcgggagatgtcgaagtaggcgtagaacgcgccattcggctccacctcaaccggcaaaccgatgcgcttgagcccgtcaatcacaatgcggcgacgggccagcaattcctgacgacgagcttcgcattccgccaagctttccggcgtgaagcaggcgagcgccgcatgttgcgtgggcgtgtgggcgcacaggtagtagttggtggccagatcgtcaaccgcttccagcacagtgggctcgtccggcagaatcgcccagccgaggcgccagccggtcatgccgaagaacttggagaagctgttgcatacgatggcatcggggtcgcaggccagtacggacttgacttcggtaccgtccggctcccggtcagccaaatcaaggtaggtttcgtccacgatgcgccatgcgccgcggctggcggccaacttgcacacctcgtccaatacgttgaagtcgatggtggtgccggtggggttggacggcgacgtgatcattacggccttggtcttgctcgtccagtactggctgcacaggtcggcggtcaggtggaagcgggtggcggccgaggtcggcacatcgatgacccggccttcaaacgaccgcacaagttcgcggttgcatgggtaggaggggtcggccacaatcacatcgtcaccggggtccacggtcagcgcggtggccaacagcagagcggccgaaccgccggcggtcacgcagatacgcttggggtcgatgtcaaggtcatgacgctcgcggtagaagtcggcgatggcctgacgcagttcaggtaggcccatggcggcggtgtacggcagggcccggccgtcgtactgttcgcgcatggcgtcgcgtacggcgggcggcgcgccgaaatcgggctcgccaaggcttaatttgatgacgctggtaccttgggcgatcatcttgtctgcttgttcgccgaataccatggcacggaagggattggcctcacgcgctcggcgggacatgactggagacgcggccggagattggggctgctgcgctgcttcgttttccatatttcggttctatccgcctcacgggacaaggtttcttcttctataatcactgtaggtcgattgagtgcaccaacccgcattcaaggaggaataatgagtcgattcaatggcaagcgcgccgagttcgaggccagcggcgaaaaaatcaacgtcgcgattctgggtgcgggccgcatagctcacaccatggccggcaccctgacccagatggctgaagattcactgtattcctcatggattcacccgtatgcggtagcggcccgtgatattacgcgcgcgcaggcttttgccgaccaatggcattttgacaaggcttatggatcgtatgaggagttggtggcggacccggatgtggatctggtgtatatcgccaccccgcacagtctgcacgccgaacaggcgatcctgtgtatgaaagccggcaagaacgtgctggtggagaagtcgttcaccgcgaacgccgggcaggcacgtgaggcgctggccgtggccgaggaaaccggcatgctgtgcacggaggccatctggacgcgctacatgcccagccgcaagctcatcaacgaagttatcgagtccggcgagatcggcgaggtgaaagcggcgagcgccaacctgtgctatccggtgtccggcaaggcacgtatgaccgatccggcctgtgccggtggcgcgctgctcgatgtgggcgtgtatccgctgaacttcctggatatggcggtcggcgccgaccatggccgtacacttgatcatttcgatacgtcgatggtgcccgccgaaaccggtgtggatgcgcagaattccaccacgttgtattacagcgacggcacgatggccgtgtccaccagttcgatgctggtttcctccgaccgcggcggctatgtgtggggcaccgagggttatctggtggtcaccaatatcaacaatcccgagtccatcgacatctatgacaacgcccacaagcccgtgcgcagcattgcggtgccgccgcagttgaccggttatgagtatgaggtggccgatgcggccaacgcgctgctggatggcaagatcgaatgcgaggcgatgccgcacgccgacaccatccgcatcatggagctgatggatgcgattcgcgaccgttggggcctgaagttcccgtttgaggtctgatttcagctcccctccagaggggagctgaaattattccgctgaatctgcatctccttcaacaatctgctcatacagccgtgcgaggcgttcgtcacgcacggctttcgttaattcgcactcccatacggtaattacacgccagccggcggcctccagttcagcccgctgcgcgatgtctcgattgtgattgcgcagtagcttcgtctgccagaattccacattcgatttcggcatcgaatgtttggaacagccttcatgcatgtgccagaaacagccgttgatgaacacgatggcgtggtatttcggcagtactacatccgggtggccggggtaacgcttgtcgttcttgcggaatcgcaaacccttgcgaaacagatagctgcgtaccagcacctcgattttggtgtctttgccacgaatatgcgacatcgtgtacgaacgggtgccccgctcatacctctccactggctgtttcttgcgattcacgcactccagactaccgtgacgttgcggcgaggatgaaagcctgaacgaacaatcacccatcttgcccgtccgtgtctcttatcgcgggcaatgatcatctgccggtcgagactgcacgattagactgaatcaaatggatgacatgatgattcgtagggccacggcggccgatattccccaaatcgacgaactgctgcggcaggtgctcgaagtgcatcatgccggccgaccggatctgttcaaaggcgatgtcaagaaatacacggacgaggcattgaaggcgattctggccaacgatcagacccctgtgttcgtggcggttgcgccatctgccaatgacggcactgacgccgaacataacgccgactcccccgccaccgaccaagtgcttggctacgcattctgcgtgttccagcagcacctcaacagcaatatcctgaccgatatcaaaaccctgtacatcgatgatctatgcgttgacgagcggtcccgcggccaccatgtaggctccaccttgtatcgctacgtgctcgacttcgcccgtcaatccggctgccacaacgtaacgctcaacgtctgggcctgcaaccccaaagcccaagccttctacgaacgcatgggactcactccatattacatcggcatggagcaggtgctgtagcgccgccgtttcagcagcacgatgatggcgatgatcgcagcgaggctgcatagggccacgccatatacaaagcccggagttccgaaattcatgaggcagattgtgatgttaccggtagtggttaccgaaaacacgacgataagcgcgacgatacgaatcatatccagcagtccagctgcttgagccaacagacgctccggtaccaccaatttggccgccgtgcacagcaaagtcgcctgaacggcgagcagaatcgcccattcccagaacatggacggttctttaagcaacgtggtctccggaaacatagacaccacctcattgataaaccacggcgccacaacaatctccacatatgcgagcccaatacaacacacgacaagcaccacggcaatggcatagcgccaagcgacgtctgttttgcgagatttacgagaaatgaatgcgataccagcgttcatggctatgctccttaatccaatatcaatatcaatggatgaacctgcactgcaccgtatgccaccatcataatatatcgaatatcgatataaaaatatcgaaaaacactttcaccattcacctacacatccgcaaacccatgaatacacatgttcttaatcgggatggggagtgcacaaagaagctctgtcaccccagcagattgaggagatcgtccttggtgagggtggcgatggaggcgggggcttcggtgagggcgctggcgccggtgccggcttcgtcggcaagcaaggaagcgtcggtgaactggcgggcgagctcgctcttagtatgctgaagctccaagatacgttcttcgatggtgtccttggccaccacctgatacacgttgacgtcttcggtctggccgatacgatgtgctcggtcggtggcctgatcctgcgcggcagcgttccaccatggatcggcgtggatgaccacgctggcaccggtcaggttcagcccggtgttgccggccttcaatgaaatcaggaaggcgggcgtatcgtccgcattgaactggtcgacgagttcgagacgcttctttttaggcgtggatccggtgatggtgtagtagcgtagtccttgcgcgtcgaaacgttcggcgatcagatcaaggaagctggtgaactgggagaagatcagcgccttcttgccttcgttcacacaggtttccaccagttcggtgatggcggcaagcttggccgattgatccttggcatcggcgtacagcagcctcggatcgcagcagatctggcgcaacttggtcaactcggcgaggatgcgaatcttcgacgtgttgaaatcggcttcttcgctgtgttcgagctgcattctgagccgctgctcgtgagccgcatacagtttgcgctgttcgccggcaagccgcacggtcagcgtggtctctagcttgtccggcaaatcggtcaacacctgggacttcagcctgcgcttgatgaacacgcccaccaacgactgcaattggcgagatacccgagcggcctcaggattgacttgtgcggcggcccgaccttcagccgtgctgccatccgcggcccgggcattggagatgggcaactcataacgctcatggaatcgcttatatgagccgagcagccccggcatcaggaagtcgaaaatgctccatagttcggagagtcggttttcgatcggcgtgccagtcaaggcgaaacgatggtcggcggccacggccttgaccgctttggctattttcgtggtgtgattcttgatgtactgggcttcatccaatgccatgacattgaaacgttgctcattggcggtgtaatcatcgacatctcggcgcagcaggtcgtatgaggtgatgagcacggtgggttcatccgcccggaacgcacggccgatggcggtacggcgctcggctttggtaccggccaccaccacggcattgaagctcggggcgaacttggtgaattcggcaccccagttgtacaccaaggacgccgggcacacgatcagcgatgggccaaggctgccgtcgcccatctcgccggtattccgctgatatcgagacaggagcaacgcgataagctgcacggatttacccaagcccatctcatcggccagaatgccgccaaaacccttgtcgcacaacgtgttcagccattgaaagccttcgacctgataagggcgcagaatatgcttgagactatccggcacttcatacgacttagggtcgatgatcttgagatcgtcgatgtattcggtgaacgaagcgtccttgactacatcggagccgtcatccggcagctcaccatccagtaggaatgctcgaccgcccggcaactcgatcagtccggagttgagctgctgctcgctcagatcgaggtcgctggccaatcggtccaacgtgctgagattcgcgccgctgagtttgacaagcgtgccgtccttcaactgatggaatcgttgacgccgacggtacgaagatagcaaggcacccacttcgtccggcggcacttcatcagcgaggggtgatatctccaccaagttgcctttgatggacaatccgactttgacgcttggtggcttgggcgcgatcagccggtcaaaagccggtgtggtgaagacctcccccacttcctttagtgccggcaatccctcgtcaaagagacgaacgatctgcgtggtgtcatcgcgatcgatagtggccgcatcagacacgaattttttggtggcctttcgcgcggccggcgttcggaacccattcaccgtctgatgagtggcggccgcaacgcgcttgcgctggtcaggcatggtaaagaattcacgcactacatcaatcgcaagatgctcagcgtcgaaatcacgcccaatcacgccccgagacaaggggatggaacgctcgccctcagcatgcaccgtcgggccatcgggtagcaacgggacaatggcatcgccgtagcgtgccttgacctcgcattgcacaccatgctcatcacgatccagataaaactggaggctgcattccgtaggacttaattcagccagctcgcgaggaatctcactggcctccaacagtccggcaccaaccagctgaggcaatagcgtgcgtgcgaatagggcgatgtcatcgccggcaatgacctgtccctcgccatcgggttcaaacaggtctcccaatagtcctcgcaacggaatcaatcgtttcgggcaacggacgaatcggcatcctgctgcgcttttacgctgagagcccgccaccatggcggataccgcaccggccggattagtggaggcgagcaacagccatacattcttgccgccgtcaatcacggtttccaccgctggcactccggtaagcaggtatccggcatccggaccatacgtattgaaatcacgccgcgcaatgcgcatgagaaaatctggctcgccaccatcaactggcaccgatgcaggctgcccggagaaccatgtgttcagcacgagctgtacgcctctgccctcacgtacggacagcaaccgggccacttccggtgctgaaagcgtcagatgacggtcgatggcgatatgcccgtaatacctgtcctgctgctcggccgcacgacgcacggccatcgcatcatcaaggacgtccagcagtgggcgcgaatcatcatcgagcatatccggcgtatgagtaaaggcaagcttctgcccataatccgcatagtcgccgttcgccatggcaagcacaaattgcggaatcgatttcagcacatagctggacccattggaagccgagccgatcttgaactccacgctccacacgccgtcgatgaaactcaatatcgggacaagctgcacctgccccaagcccacagtctcgctgtcaccctgatacccgccgcctcgggtgccggcacgagagccgtatccgctttttgtacgccgagcatttgcaccgtttttcccttgcgtggcatcaaaccgacgcataaccgcattgcgacgacgaattttggcttgagcgtcttgcctatcggcgtgctccatatagtcaatcagcgttcgagacggtcgtgcggccccggcacggtagccttcaaaacgctgcggatcatcgcagaatatgaaggcgagcgcaatcatgtgcttgcacatgccatagccacggccgtaagccgggcatgagcacttgccgccgacctcctcccccgtatcgaggtcgaattgcacgctggtgcgatacctacttgatgggctggtggtgccacgtagaataccgtcaagttcggcatacccggttcgatgattttcgctgtataccggattgataaccatggtggccgctttgcgcgcaatgctacgggcacgagcgagcacggcattcgacgatgacgattccacatcgttgcgtaacgcaaggatagggacggcatgggcttcggcacgcttcgcagacccggcgaaatggccttcgtcctcatcgtcgaaccatacggaacgtccttgcctgaaacgatagggcatcaccgcatcggcggcggacaaactgtccgttccgccaaacgttacgtctctgctgccggccgcgcctgagctaccaagtattccacccgtctcaccagaaatgccgcctactccgccgcttttaccggcatagatgcccctgcccccattagtgtcatcagtgtcatctatgtcataccgaccgtcgtcgtaatcggcatcttcgtcgtctccccttttccaaggattgcgacgacgcaacgcatggccccaggaaacgccggaatcatcatcctcataaggcaggaggccatcgtcatccgcattctcgggaacatggccaaacacaccataccctttgctcatgggcgagcctcctttccagcgaatgtatttcaacccaacgtttccatcctagacgaagcgcgcggtagccttaatgtatggatgcagacaagccggcgcaacgcaaatcctatgcagggaacaccaccctcgaaatcttcgaggtgctgtggcgtcacagctactttgggcatggcctgaccgtgcggcaaatactcgatgaacttgcccgtaaacaccagctggaagatccaagcgagctgccgaccgagaagaccatacgaaatcagctcaaaaagcttaccgccacggaatttctcggcagacatatcgggcatctcgccgaaagtgatcttgccggcatcgaatgcaagaatccacaacccggctggtatcttgatgcattcctgtccaccgccgaaatgcgactgctgctagacagtcttaccctatctcgcatcagcctcgacaccatggacgacctcatcggtaaaatccgcgagctcgcaggcgccgccgggcaggcagtaggctacctggaccatgtggccacctacacgcatatcaacggtgagttcctatccactatcgaccagctgaatcaagccatcgaagaaggccacggcgtaaccttccaataccgtgattacggcccggatggcaccttgataccacataaaagccgtacgggtgcaggccgaattacctacaccgccgacccgtaccagatggtgtacaagaacggacgctattacctcatctgccacctgcatggcgaagacaacctccgcattttcgtggtcaaccgaatcgccaacgtcagcgccaaaggcaggaacggcacagtgccactggaaaaaccagcaccagctgattttgacgcagtgaacttcatgcgccaccgtccataccccgtagccgatgccccgattcgcatccgcatggccgtacgagacgaatccatgctcaacaacgtgttcgaatggttcgacgaccctcaaatcaaacattcgccggacggcacacagttcgaagtcatcgtcgatgctcccgaacgcgctgtgttctggtgggcattgcagtattcctgggatggccgcgtagtgattcttgagcccgattcgctcaagcgcaaactctatgatgccgggcgtcgcatggccacagcctatgctcccgaatgatgcaacatcacatcgcacacctccttgtcgagttgttcaccagcgaatttcaccggagaacctatcatcccatcgccaatcacactcggtaattttttaccgggaaatacgatttcaagccatttcgcgggcatcgtccctcacctaggcgcacataaggctaaggtgggaatcattaatcgcatcgcgcgtccacaagcgtgcactagcgcgtacaacaataaggagcaactatgagcgaagagcgtaccgcatggggctggggtctggccagcgtagacgccgccggcaccaccctggacgtctggtaccccgaactgaatctcggtgaggcaccggccgaggccgatcgcccgaaccacaatttcggtactttggctcacgatgaggccgacgcccgcggcattcgccgcgtgccggtattcgtcgtcagccagttggacgagccgatcagtaatgccgcggacgcttacctgaagctccatttgatgagcatgcgcatggccaagccgaacacgctgaacctcgacggcatcttcgcccagctcgccaatgtggtgtggaccaactacggccccttcgccgttgaagacttcacgctgcgcaaggccgacgtcgaacgcgcctccaccgaagccgctctcgctttcgcctcccaggccgggctgcctgccgcagctcctgccgccactgtcaacgtgttcggtgtggataagttcccgcgtatgatcgattacgtagtgcccaccggcgtgcgtatcggcgacgccgaccgcgtgcgcctcggcgcttacttgtcttccggcaccaccgtgatgcacgccggattcgtgaacttcaatgccggcacgctcggcgtctccatggtcgaaggccgtgtttcgcaaggcgtggtcgtgggtgacggttccgacatcggcggcggtgcctccatcatgggcaccttgtccggtggcggcaagctgcgcaattccatcggcgagcactcgctgctcggcgccaacgccggtatcggcatctctctgggcgataactgcaccgtcgaagccggtctgtacatcaccgccggcactaagatcaccatctgggacaaggccaaggccgccgctggcgaaccgctggaagtggtcaagggtgctgagctctccggcaaagacaacattctgtttatccgcaactcggtgaacggccgcatcgaagcccgctaccgcaaggtgggaattgagctcaacgccaagctgcacaagaactgaaattgaaataatggagcgttatcttcgttacccctcggtcgacgtaccttcgtacgccttccctcggtgcgcctcgataccgcacacattatttcaatttcagaactagccctgctagttcttatgcagccgtcgcagcatagctggtttgcgctgtacatatagaaagcgcctcactggaatctccagcgaagcgctttctcaaaccaacaatcaccgctcgtccatcggcacgaaatcgcgctcgaccggaccggtgtagacctggcgtggacggccgatcttggtattcgggtcggccaacatctcacggtactgcgcaatccaaccgggaatgcggcccagcgcgaacaacgtggtgaacatggccggatcgaagccgatcgcccgataaatcaagcccgtgtagaagtcgacgttcggatacaggttgcgcgatacgaaatattcgtcattcagcgcaatatcttcaagctcggtggccacggcgaacagcgcgcgctcgtcagacggcagcttctgcgtatcttcgcgctccatgatcttttccagatacttcctggcaatcgccgcgcgcggatcatacgacttgtatacacggtggccaaggccggaaatcttctggccattctccttggcatcacgcacgaactcggccacagacttgccggaatcacgaatcgccttcaattggcgcagtacggcctcattcgcaccaccatgcaacggaccggacagcgcattgacgccagcggccaccgccgaatacaggttagcgtgggcggaaccggcgatacgcaccaccgaggtcgagcagttctgctcatggtcggcatgaataatcaacaaacgacccaaagcatgcacatacagcgggtcggattcaaacggctcgtacggcacagcgaagcacatgcgcaggaagtcgtccacatagccgcgcgcgtaatcggggtacagcatcggctcatcgcgacgacggcggaagatgtacgacacaatcgtacgggccttggccatgatgatcttggcggcctcatcaagctggtcgttgtcagaaatatcggtggtgtccgggtagaacgtggccagcgcattgatggcggaggcaagcacgctcatcgggtgagcggagcgcgggaacgaacccatgaaggtacggaagtcttcgccaaccatcgtcttgtgattgatgtccgcacagaactgctcatactcagccctgctcggcagctcgccgtggcgcagcagccacgccacctccagaaaatcggagttctcgcacagttgctcgatggggtaaccgcagtagcgcaaaatcgaatgcttgccgtcgatgtaggtgattttcgattcgcactgcgcggtggtgaggaatccgggatcaagcgttacccagccatcgttgcgcagtttggaaacgacgatgccatccggccctgcactagccttaaccacgggcaggttgaacttgttcgaatcgacatcaagttgtgccgttgccattcgcgcaccttcctcttcatgaaccacttaccccaaacattaacgttcacgcgttcgcgaacactagtgttcggtactctatgtcttctgtgttaccgctggcgaatgccggtcgatacacgaaagccgaagtgcgctcatgctatcaaagcaaacgcacttcggcttgttacgtctcgaattcgcgggaaaaccgcgaacagacggacggctaatgagacgctgatcgcccatcacaggccaatcaggcacctaccatacgccaaacgccgatcagaggttggtgcgatcggtgaaaacgatcgggccgttctcggtgatggcgatggtgtgctcggagtgggcgccgcgcgagccgtcggaggcacgcagggtccagccgtccttcggatcctggaagatctcgtcggtggtcttgaggaaccacggttcgatggcgatgaccaggccttcgcgcagcttgtagccgtggtgggcgcggccgtcgttcggcacgtgcgggtcgccgtgcatgatgtggcccacgccgtgaccgccgaactcgaggttgatcgggtagccgtattcgcgcgcgacgtcgccgatggtgttggagatgtcgccgagacggttgccgggcttggccacgtcgatggcggcggcgagcgcttcctcagtgcacttgatgatgcgcaggtcttcggggtccgggtctttgccgaccacgaagctgacggcggaatcggccacccagccgtccacagagatggcgagatcgagggagacgaggtcgccgtccttcaggctgtagtcgtacggcacgccgtgcagcacggcgtcgttgacggaggtgcagatgtagtgggcgaacgggccggtgccgaagtcaggagcgtagtcaacatagcaggattcggcgcccttgcggtccacgatcttcttgtggacgaactcgtcgatttcgagcaggttggtaccaactttggtggtctcctgcagttccttcagaatgccgccgacaaaacgaccagccggcttcatttcctcgatttcacgaggggttttcagttcgatcatgagattctttctaccttgttgagacttgttctcaactctagaccagcccgaggtcaaccgccagaagcctacctgaaatccactcgcagcccattaatagccaaggccgagaaaaagcgcccggcagcacatagcctgcacgggcgctttggattgattgtctggggactggttgcatgaagcgtgagattacttgcgacgcttgccgaaagtgaacgcgcgaatcactgaagtaatccccatcaccaccatggcgcatccgccgaagataatcatgaatacggcggagctcagcgggctcatcagcaccacgaagccggcgataatcgagatgatggcataggcgatggcccagccggaatgcgggatacgccacgattcaaccagcgacagcacgccttccataatccatccgaaaccgaccatcaaagtaatgagtaatgccagcgtctgaccggtcatgccgtagttgcgcacaaccaccacgccgccaaaggtcagcagaatgccgacgaacacgtccagcacacgccagccgcccggcagacccggctccacgagagcgctgacgatgcgcaccacgccggaaatcacgaaatacacgccgagcaacaatgcggccaaagccagcgtcttgttcggcaccagcaacagcgcagcgcccaaggcgatggcggccacgcccaccacgccgtaaatgatgcgaatcttggtcttggctttttccggcagccattcctcgatcaggcggaatggactgaaattgccgacataccagttggtctgctgccagccgggttgactttgatcgccccatggaccattcggctgcccgtccgcttggctattcgattggccgtccgcctgataccgccgaccgtccggcccccatgccggctggccgttcgggccatagttcggattgtaggcgtacgggccgtagtacgggttctggttcggttcgccttgtggctggccgttctgcgcatgctgattctgagtgtcttgcgctcccggcgcaccttgcggaggatattggccgccatgattgctgtcatacgcaccatactgcggttggcccggttgacccgccggattcggctggttcggctggctctggttgggctggcccgtctggccattccactggtcctcgttcggattgctcatcgtaactccttagctcaaggtccatgttcagattccacatactatgatagacaagttgtctaatttgaaccatcaccacaattaggcaatctgtctagttcactgacagcgcaatgcccataacgcaatatctgcaccatcaacgcttctcccccgccgcgattaggcttagggccatgaccaacgaaaccgaaacgctgacgtcgggcatcgacccggcatcgttctcctccgtcatcaagccgaccaacgacctgttccgctacgtgaatggcccatggatcgacacctaccgattgcccgacgatcgttcgcgctacggctccttcgacaagcttgccgaagacgccgaaaaccaagtacgcgacatcctcgacgccgacgactgcccggctgtcaagtctgaggccctgtaccgctcattcctcaacaccgacgccatagaggccgccgggcttgacccaatccgcgacgagcttgacctcatcgattccgccatcgacaaggccgcactcacgcgcgtgctcggcacgatcaacccagccggcggccccgatctgttcggcttggccgtttacggcgacccgggcgacccggaccgcaacatcgcccaccttgagcaggccggcctttgtctgccggatgaagcctactatcgcgaggatcactacgctcccgtgcgcgaagcatacgtggcgatggtcgccacccagctggtgaacgccggatacgcgcccgccgccgagtccaacggtggcgatgagctgccgtccaacaccggcgatgacgagagcaacgctcccgccacggttcccagcgaagccgcgctcggcatggcccgccacttccttgccgtggaaaccaagatcgccgccaaccattgggacaatgtggccacgcgcgactcggtgaagacctacaaccccaccgattacgccgatctggccgccacgctgaaaaacttcgatctcggttcttggatcgacgcttggcagaccgcttatgacgccaccgaagccgccaaggctcagccgattgatttcaagtctgtgttcgcgcgcgtcattgtgcacgagccgagcttcctcactggtcttgatgcgttctgggccgaggccgatctggccgaccttaagctgtgggcccgtgttcacatgattctgggcttcgcctcctccctgtctcgcgacttcgacaccaccaactttgacttctacggcaaggtgctctccggtgccaagaagcagcgcgatcgttggaagcgcgcggtgagcctggtcaacggcatttgtggtgaagatgtgggccgcgaatacgtgcgcctgcacttccccgaaagctcgaagcgccgcatggaagagctggtcgccaatctgattgacgcctaccgcgtgtccatcaccaattccgattggctgggcgaggacaccaaggccaaggctctggagaagatctccaagttcacgccgaagatcggctacaccaaccactggcgcgattattcggcgctgagtgtttccgcggatgcgctgcccgccgagaacgccaaggccgcgaacctgtacgagaccggctatcagctggccaaggtcggcaagtcggtcgacaaggacgaatggctgatgaatccgcagacggtgaacgcctactacgagccgagcatgaacgtcatcgtgttcccggccgcgattctgcagcccccgttcttcgacccgaaggccgaggatgcggcgaattatggcggcatcggcgcagtgatcggccacgagatcggccatggcttcgacgatcagggttcgcagtacgacggcgacggcaagctcaacaactggtggaccgacgaggatcgcaagaacttcgaggcccgtaccggcgcattgatcgcccagtacaacagctttgtgccgctgcagctggccgagaagtacgctgacgagcctgataaggcaccgcacgtgaacggcgcgctgaccatcggcgagaatatcggcgatttgggcggcgtgaacatcgcgctcaaggcgtatgcattcgcgctcggcaaggcggcaggtaagtccgacgccaaagaagacggctcccccgccgccatcaaggcactgctcgataccgcccccgaaatggacggattcaccggcctgcagcgcttcttcctgagctacgcctccatctggcgcaccaagaaccgcgacgagctggccgaacagtacctgcagatcgacccgcattctccggccgaattccgcaccaacggcatcgccagcaacgtggacctcttctacgatgcctttggcgtgaccgaaggcgacgccatgtggctcgcgcccaaggaccgtgtgcgtatttggtaatccccgttatgtaaaggaaaaccgctgtgtttgcctcgattacaggcgaacacagcggtttttcatgatgtatggttggcactcagaattcggaatcactgggattggaagattcggcgaaaccgtcgacgtaggtttgttgggccacgggctgtggttgattggtgtcggcgtccggttgcgacatgacggcatcggccacggccgcggactcggttgatggcgacggcgattggccggaatcggaggtgaccccaaattcgacggggccagattccgacgaggtcgcatacgggtcaatacccacaccggatgcggcaccgcccgcgccatattgcgttggcctaacgtacggcgacgatgctcgttgcccgtttccgccatccataccttcgacggcaccgttggcattgccgttaccgttgccaccattgcctccgttcccattaccggcacgctgtggcttgatcagcgacgtggtgccgaaggtcaggtcatgcccaatgttggtggcttcgagaacggttctactgcgcggttcgccttgctcattggtccactgctcggtgatgagtgagccgaccacaatgatgcggtcaccgcggcgaaccgaactggcggcgttcacggccaaagcacggaacgctttgacgcccacccatgcggttccgtaatcctcccattgtctggtagtcgggttgagtcgactgcgcgtgctgcccatacggaatgtcagcacgcggaagctctcggttccgcctagtgtcggatcaccggccacaaagccggtgacggtcactgctgcttgttgatttgccatgatcggtcctttcctcggcctgctggcctgttgtttggatgtggaccgccggagcctgtctccggcttcattgccggcttgcacgccccagcggtacctccactgtgaggcatgacgtttgaagtgcacaagggcaactggcaaatgtggatactgtgacgcagttgaatttttaagaatgtggataagtttcggttatccacagcaaagcgccattctgcgactgggcagaatggcgcttgatgcgattaacgccgaggctgagtaagtgggactcaactgagggcggcgaagcgctcggcgagcgcgtcggcggcttcggcggcgggcacggcgaccttgttttcgccgttgcggtcgcgcagttcgatggtgccgtcgttgacgtaatcgcggccgaccacggcgaccagcggcacgccgatcagctcggcatccttgaacttgacgcccggagacaccttcttgcggtcatcgtaaataacctcaaggcccttggcttcaagctcggcgaccagcttctcggcaccttcaaacgccacggcgtccttgccggtggccaccacgtgcacggcagccggggcaatcacggacggccaagccaagccggcttcgtcgtggtgtgtttcggcgatgcaggccagcacgcgggaaacaccgatgccatagcagcccatccacaccggcacggccttgccgttctggtcgagcaccttcaggtccagtgccttggagtacttgagacccagctggaacacctgaccgatttccacaccacgctcgaagctcaacggaccggaaccatccgggctcatgtcgccgtggcgaacctcaacggcttccaccacgccgtcgaccttgaagtcacggccgtacaccaggttgtagtagtcgacctcgttctcatcggcaccagtgaaccaagcggaacccttgaccacgtgcgcgtcgatcaggtagcgaaccgggttcttcacgccagcagcctcggcctgcgggccaagcaccatcggtccgatgtaaccgggcaccagttcggggtgctgcttcaggtcttcctcagtggcttcctcaagttcggcgggcgcgaactgggcttccagtcgcttcatatccaccgtacggtcgccgggcacgccgacgacaatcacttcacgccacggctcgtcatgctcttcatcctcagggtgcttgacggtgatcaccacgttcttgaggatgtcggaagcctgccattcacggccatcagtacgcgggtggtcggcgttggcacgctcgatcatgttatcgatggtcttggcatccggggtggcttccttggaagcggcgggagtggtggaagcatcgatttccggtagttccggagtgctcagggcctccacattccatgccttgccggaaggtgccagcgcgaaggtatcttcgccgatcggcatcggagccaggaactcctcggatgcggagccgcccatcgggccggacatggcgaacacaggtacgtacttcaggtcaagacgctggaagatacgctcgtaagcgccgcgctcgtcatagtaggccttgcgcatgccttcttcatcgatggtgaaggagtaggcgtccttcatgacgaattcacgaccacggatcaggccggcgcgcggacggaactcgtcgcggtacttggtctggatctggtacagggtgacgggcaggtccttgtaagaggagtacatgtccttgaccagaagggtgaacatctcctcgtgggtgggggccagcaggtaatcggcctcgtggcgatccttcaaacggaagatgttatcgccgtactcctcccagcgatgggtggcctcgtagggttcgcgcggcagcagggccgggaagtgcacttcctgggcgccgatgccgttgatctcctcgcggatgatggcctcgatcttgttcagcacgcgcagaccgagcggcagccaggtccagataccgggtgcggccttgcggatatagccggcgcgctgcagcagcttggctgaatcgacatcggcatcagcggggtcctcgcgcagggtgcgcaggaacatggttgacatacgaagggtattggaagtcatgtgttccacgatattcgcgtgaaccgacaagcccgcctgctattcgcactattccgaccttcatcttggcattcggactcactcgtgcaacaatgacggctagaagggtagaagggcacgatgacgcaaccgaccgagcaacaggggaatcagccggaatcctcggagcagccggtgtatcaaccggccccagcatgggccccgcaattttctgctgcagcccccgcaattcccaacggcagttccacaacaagcggtatcgcaacagccaatggccatgccaccgtttgcgcaatcgcctatgtcggtcccggaacaagcggcctgcccgtatcaaccgtaacagccgggccgggcctatgcttctccctgcccctacccgaatccggcaatggcccagccgaaccaaccatcagtcgcgcaagagcgattcgggcgttcgtcgggacggctgaccgcatcacaggttattgagacatgcgccaccattcttgccggcgtaatactcctcggtcttgcatggaccaacccgcaaccgtatgccccggtggatcttatcgccggcctgtccggagcggccgcgctgattgtgggtgtgcgtttgccgcaagtacgcccgatgctgcgtagctggccggcattgtggcttgctttgggcggcatcattctgattgtggcagccgcgcgctatgaggcgagcctcaaatcgatgaggacgattgccgcgcgtattggcgatctgcggtgaatcgcgcgggcgacctgaggcagattaccaacgtccggcgatagcagtcctgcatacggggcagtgcccattgccaccgtatccggcagataaacgattggcaatgattcgataccaatcgcgttccacgagcttggcccggcattcagggtttgggcaatacgtggtatcgccttcacgatcatgcacgttgcctgtgtacacataattgagtccctcttcgagggcgatgtctcgggcgcgggtcagagtctcgtgcggggtgggcggtacgtccatcatgcggtaactggggtggaatgcggagaagtgcagcggcacgtccggacccaagtgctcgcgtatccatgtacattcagcatgcagctgggcgtcgtcatcgttgaatccagggatgagtagcgtggtgagctccacccacacgtgttcgccttctggtgtgcgtgcctcgttgaccgcatagtcgatggtctcgagcacatcggccagatgagtgccggtcactttccaatagaactcttcggtgaagcctttgaggtcgatgttggcggcgtccatggccgcgtagaagtcgggccgggcttcggcgctcatgtatccggcagtcacggcgatgggatggatgccgagcgctcggcaggcttcggccgtgtcgatggcatattcggcgaacacgatcggatcgttataggtgaacgccaccgaatcgatgccccggtcggccgcgacctgcgcgattttctccggactggcttccatgccgagccggtcgaagctgcgggctttggcaatatcccagttttggcagaatcggcaaccggaattgcagccagccgtgccgaaactcagcacactggaaccggggtggaagtggttgagcggcttcttttccactgggtccacggcgaagccggagctgcggccgtaggtgtcggagacgatgagtccgtcgtggtttgagcggacgaagcaaaagccgcgttggccgggcttgaggacgcagcggcgcgggcatagttcgcagcgagcgcggttggtaccgtcgtggaattgcgtttgccagcgggctatggcggggttacgaacatctgtgactgacgccgtatgaccgcacgattcccgatgaccaccctccggcgcttcgcgccacctcttgccagcgggaggagatatggttgctgcgttaatgctcggcataggcggtcacctcgtagcgttgacagtcgatttcgctatcggtccagtcgtaggaagggcggataccggctttggcgagcaggtgagcgacgaaatcgtgcggatcgggcagctcatcccacacttgtggcaggaatgtggcgctgcggccacgacggtcggcgagaatcagaccgtctttgccggggcgtaatacttcctcaagttcagtgcgcgaacgtaccgggcgttcgacgttgctgccgtcccgtttgacggcgtcggtctgaggtccggattgcagcgatgccagagtcgcggtcttcgagccggtaccgcgcgaatcggcgtcacaggagttcactgtaatcggctcgggctcacccaagacggatacctccacgttgagcagcgggtattccgcggcggtgaccggggtgaaacgtgggtcgcgggtggcggcatccactgcgtgctcggccacgtccttgccgagcgagcggtgggcgaccagcgaaccaatgcacccgcgtagccggccaccctcggtcagggtgacgaaacaggcaccgggctcgttcagccatgggtttgcggcaagaatggacgcggtcgaatcagcggcggtcggatgctcgatatgcagccgttcccggatagcggcacgggcaagtttcagcagcacctcaccgtgggatggcgtacccgatgtgcctaagtcatctgcaccggctagagcatctgcttccggcttggattcccacgcggcaaacgagacatatcccactaccggctcgtcggcgtctcgcattgcggggcgaggttggccggcgagcgccaccacgccgtcgtcgccggaagtggaacagccgagctcgaagagcctcatgtccttgcggccttttaacacatccagaaggccgttgatcgggtatgcgccacaggcccggcgagggtgaatcggcagatgcaaagccgcaatgtccgcaatggtctggtcatccaacgcgcgggcgacttcgtgcggatgatagtgcgagagatccgaactaatcacgatgacggtttccgggccaccccacaaagcacgcaacacatcacccacctcttgtggcgtggcatcgcccgcgttcaacggcacgatagtgaggtctgggccgagcacggtctgcaggaacggaatctgcacttctaccgcatgttcttgtgcgtgggttggggcattgacgatcattgcgggagccggcgcgcccggacgggcatgtgtaccggagcgcaatggctcattgacagacaggcccagagccttacgctcggctgcaatgtctaccggcacagtgcccagcggcgtttcaaacgccgctgccgtggaacaggcgacgcctcgcacggccacgcggtgagtcggccctacgattaccgcgcgagtcacgctcccccgcccacgctccaagagcgcgtaagcgagcgcagctgccgtgccggaatatatgtatccggcgtgcggcactattaccgccctcggcacccccgctggaagtgtgggctccaactgttgcagaagctttcggccgtaatcgagctgctggttgattagctgtttgagcgcggtgcggtcagccggataaaacgaaccggccaccgctgacggacgtattgcgccagtgattttgccgctgccgtctgccgcgcttgctgcatctgacgcactagccacactgaccgtatcgatttgcacaccggctcgggcggcctcgcgaacctcattgtttccacgaaatatctcggatagcaccataactaccacctcttattccatggtagctgctacggagcgcttctaaagatcagaacaacgcgtcctgggcgaagtcatcgtcgggattggcaccgaattcgtccggctcggcgggtttgaacgcgtttgcaccttcatcggccaactggtcggaggccgcggccgaggcttcgcgcaggtcgccgtcgagcaccacggcatcgggcgagacgaggaacatgcgttcgttgacgccggccaaatagaggccgcccagcgattcgactcgggacagcgccacatatcccatgcctggcgcgaaggtgcgcttcaggtccatgaccgcacggtcaagcgtcatgccttgcgacttgtggatggtgatgccccacgcgcagcgcaacggcacctggaagacggaggcgagcacggtgtcgccgtccatcatctcccatgtggcctgtttcatggtgacgatgttgccgttctcgaattccacgatcggccagccgcccttgttctcctgtgcgaagccacgcacggtgccgagcgagccgttgacgtactggcgatcggtgtcgttgcgcagggccatgacagccgcgccttccttgagtatcaatcgctcgggggccaacatgttctttttgagtcggtcgaccaggttggcagggcctgctgtctcggcgtggaactcgtgtggatcaagcatgatctggttcaggcgcatgtcgttgagattgtcggcctgccggttcaccgggaacaggtggacggcgacctggccgggctcgggcagtttgcccagacgagtgacgagcacgtcacggtcggactgggtcacgtcgccttcgcgaatgtcggtgagcacggtcagcagttcgccggtatcctgacggtgctgttcggtcagatagcagatcaccgggttgagttcgggccataccagcgattcggtgatgaagccttcggggttcaagccggcacgggcataccgttcgcgactggcgatgaattcgggcgtgggggcgatgaggtcgcggttgcgcccggacaccgaaaccggcggcagctggaagaagtcgccggacaagacaacctggatgccaccgaacgggcgtggatcacggcgtacttcgcggcagacttggtcgaccatgtcgaacagccaagcgtgcagcatggaaacctcgtcaatgacgaggatgtccgtggcctgaatcttgcgtttgcgccgggatttgatgagtttgagcaggctggcgctcagggcggtggccacgccgacgccgctccacgaatgaatggtttggccgttgatatgcgtggaggcgatgcctgtggacgcggtgactgctacactggcgccgtcggcccgagcctggcggatgaactcgttcaagacataggtcttaccggcaccgggcgcaccggtcaggaacacgttcgcgccggcgttcagaatggccagggcttcggtttggcgcatatcaacctctctagactcccctcagggaggggagccaagtacggcggactacttattgaggatgctggtggctacgatgtcggcggcgatggccttggatgcggcatcgtccgggccgggggcgggagccataaacgccttacggtagtagcgcagctcgtccaaggactcgatgatgtctgcgagagcacgatggccaccgttctttggcgggcggttctcgtacacggccgggtaccagcggcgggcgagctccttgaatgtgctcacatccacgctgcggtaatgcaggtggctcatgaggttcggcatgtaatggtcgaggaacttcttatcggagccgatggtgttgccggccagcagcgggcgcacgccttccggcgtgaagcgcagcacgtattcggtgaccttctgctcggcctcggccaggctcaggccattctcccactcgttgatcaggccggaacgggtgtgcatctggcgcacgaaatcgttcatatggttcacggccttctcggacggcttgatgacgtaatccacgccctcgtccagcacattcaggtcaaagtcagtgggcactacggacacctcgacgagttcgtcgccgccgaagatatccaagcccgtcatttcgcagtcaatccaaatcaggcgcgaatcctttgcgctgtaagtttctgcatcatggctgtcgaccatggtaagcctcttttcgtcatgtcacccgttattacaagaacagttcagactataccccagcgcatacaagctatctcgagccacatacgcgaaaagggcctgcataagcagacccttttcacaaggaatcaacccctaactagcgcaagctagcgggcatcaaccgatcagttgttgtggaagccggagtagttcggggcttcggtggtcatcacgatatcgtgcgggtgcgattcgcgcagaccggcgtcggtgatgcggatgaacttgccacgctccggcatctcggcgatgttgtgggcgccgatgtagaacatggactggtgcaggccaccgagcatctggtagagcacggcgttcagcggtccgcggtacggcacttcgccttccacgccttccggcacgaccttgtcgctggaggtcacgtcggcctggaagtagcggtccttggagtaggacttcttgccgcgcggggccatggcaccgagggagcccatgccacggtacagcttgtactgcttgccgtgcaggagcaccttctcgcccggggcttcctcacagccagcgagcgtgccgccgagcatcacggaggaagcgccagccacgagggccttggcgatgtcaccggagtagtggatgccaccgtcggcgatgcagggcacgccagcggcacggcaggcctgggcagcctcgtacacggcggtgagctgcgggacaccgacaccggcaacgatacgggtggtgcagatagagccggggccaataccgaccttgacggcgtccgcgccagcctcaatcatggcctgagcaccggagcgggtgccgacgttgccgccgatgatctgcacgccgtcgaaggcggagtcgtgcttcaggcgggaaatcatgtcgagtgccagacgggcctcaccgttggcggtgtcgaccacgagcacgtccacgccagcctccatcagagcggaggcacgctgccaggcgtcgccgaggaagccgacgccggcggccacgcgcagacgaccctgctcatccttggtggcgtccgggtactgctcggtcttgacgaagtccttgacggtgatcaggccggtcaggtggccttcctcgtcaacgagcggcagcttctcaaccttgtgctgggcgagcagacggtgagcgtcgtccttggaaatgttggacgggccagtgaccaggttctccttggtcatgacatccttaaccttcagggtgtcgtaatcctcggaggcgatgaagcgcatatcacggttggtgatgatgccgacgagcttgttttccttgtccacaaccggcagaccggagatgtggaacttgccgcacagcttgtcgaggtcggccagagtgacctcggggttgacggtcagcgggtcggtgatcataccggactcggaacgcttgaccacatcgacctgagcggcctggtcgtcgatggacagattgcggtgcagcacaccgataccaccgttacgagccatggcgatggccatctcggactcggtcacggtatccatggcagcggagaggaccggggccttcatcacgatcttgcgagtcagatgagtgctggtgtccacttcggagggaatgacatccgtctcgttcggcagcagcaacacatcatcataagcaaggccgagcttggcgaaaatcggaggaaggggagcatacgccgattgggcgttcaattcatcgaggtttgtagccatacaaacactatatgaacacgcgctgaccttcacgacacacgcttgtgagcgctcacttatccgctgccgggtcctgcacctcacccgcctgcgagtcccgcgaatccgcaggcgaatcagtcatcgaatccgttgcctgagagccaatcgaatcccggctctcccctactgcagactgcgacttagccgtagcatgctgcgcgttcttgcgtgcggattcgagcgtcaggttctcggcttggatctcgggaatacgatgccgcagataggggtacatcgtggctatggtcagcaccaccacggcgatgggcatgcccacggccacatgctgcgcttcgaagaacagaatcgtcagcgaaccgaatgcgatcagcgcggcccatccccacaggatcagcacagcgccacgcaccgaatgcccgatcttcagcatgcgatggtgcaggtgcatacggtccggatgcatgggcgactggcctttggccaaacgccgcacaatcgccagacacatgtcaagcacaggcaggaacaacaccagaatcggcagcagaattggcatgaacaccggcagatagatgctggcatgaatcgaggccgggtcaagacgtccggtcatcacaatcgaagcgcaggtgatgagatagccaagcagcatcgaaccggaatcacccatgaacagtttggcgggatgccaattatgcagcaggaagcccacgcagatacccaccatcatcacgtcgatcagcgtggccaacgaagcataactcggggaagaccgggcgatgatatacgaataggcggcgaacgctatgccaccaatcgccacgataccggccgccagaccatcgaggccatcaacgaaattgaccgcgttaatcgaggcgacgatcaggaatgcggtgatcgccatggacagactcggcgaggcggtaatcagcgaaccgcccaaaggcagtgagatgatctgcaatccgccccaagccacgaatacggaaatcagcagctgaccggcaagtttcagcatccaatcgagatcccacaggtcatcggccatgcccagcagactgatcatgatgccgccggcaagaatcacccacatctggtaattgccgttgaacaatcccgagagaaaaggcagccgactggcgaatacggtagccacggcaaaaccgatcagcatgccaaggccgcccatgcgcggcgtgggaatggtgtgcacgtctcgggcacgcacctcgccaaccgcaccgatttcgatggcgacgtggcgaatcagcggagtcaccagccaggtgacgccaccggcgatggcagcaatcagtaggtagattctcatgcgccgagtcccccgccgttgaggtggagggccttgcgaatcacgttttgggcgatgacgccttcacgcaggatctcgatgccgtcgcgcgcgtacgggtcggctttgacgacggtgctggagacatggccttgggtgggaccgccgtccagatacaggtcgacttcgctgccgaacgcatcaaccgcctcctggacggtctgtgcgctttcgtcgccggaacggttggcgctggacgcagccagcggaccagtggccttgagaatcgcgaggcacagcgccgaattggggatgcggatgccttgcgtgccggggcgaccatcggcggtgtcggccaaagtctccaacgtgcagtcgggccgggctacggcaatcggcgagaacgcgccgggcaggaacgccgccgataaacgattcagtggagacggcaggtctagaccgagttcatcaagctggtcggtggatgcgagcagtacctgcaacgccttatagcgcgggcgacgcttgagccggtagatacggtcgatagcggccttattacgcggatcgcacgccactccatataccgtatccgttggaatgacgaccaatccaccatcccggatgacacgcgccgcctgtgccagcgattcatccgtgactttcagcgttgttccgccttccacgctcacgccacctccgttcgcttgtgtattcacaatctaccattgcaccattgcgccccgacttgcatagttcatcatcgctcgtttgccgtactgccgttttccgattcgccccacacgcacagaccgtagatacaatgagttcatccatgctctttcgcgaaattacaggagtgttcaatgagcgaaatcaatgctgaatccaccaccatgcctcccgtcgaactgcgtatgccgcgcgccagcgagcgcgaggagatgctcgccggcaaactgtacaattcggtagaccctgaattgaatgccctgcgcgagaaggccggcgacctgtgcgcgcgcttcaacgccgcgtcgcgtaccgatcatgccgcccgtgccgcgattctcgatgagctgctgcccggccacggtgccggccttgacgtggtggggccgattttcttcgactatggctgcaacatcaccatcggagagcgcgtgttcgccaacttcaacttcactgtgctggattgttgcccggtgacgattggcgacgacgtgctgttcggcccgaacgtttcgctgctgccaccgatgcatccgttgcgttggcaggatcgtaacgtgaggcaggcacctgatggttccgcatacgactgcgagtatggcaagccgattgtcatcggctcgaactgctggtttggcggcaatgtgacggtaatcggcggcgtgacgatcggcgagggttgcgtgatcggtgccggctcggtggtgacgcgcgatattccgccgcacaccgtggccgtgggtaatccggcccgtccgattcgcgagattacggataaggatgcttccgcgctacagtattacgcgcagtgatatatgaatgctcccgctggcgagctgtcagcggagctgactgagggtggttgccggaaatctccgataaccaccctcagcctcacttcgtgaggtagctcccgccagcgggagcatagtaatgtgagacgtcacgcgccgaggtacgccttgcgcaccttctcgtcgtgcagcaggtcggaggccttgccctccatggtgatcttgccggtctcgagcacgtaggcgcgatccgcgatggacagggccatcttcgcgttctgctccacgagcagcacggtgatgccacgcttgcgcagcgtgacgatgatgtcgaagatctccttgaccagcagcggggacagacccatcgacggctcatccatgaggatggtcttcggatggctcatcagggcgcggcccatggccaccatctgctgctcaccgccggaaagcgtgccggccagctggcggcgacgttccttcaaacgcgggaagtagtcgaacaccatctcaagatccttacccagactggactggtctttgagactgaacgcgcccatctctaggttctcctgcacgctcatgcgggtgaacacgtggcggccttccggcacatgggccatgcccagcgtgacgatcttgttcgcatgcgttttgagcagatcgtggccatcataggtaatgctgccggatttggcaggcaccagaccggtgatggtgtgcagggtggtggtcttgccggcgccgttggctccgatcagggagacgatctcgccgtcgttcaccttgaggctaatgcccttgaccgcgtcgatcgcgccataggaaacgcatagatccttgatttccagcatcagcgcgctccttccgtcagtgtcttggcaatgcttggctccggttccgccttggtggtggaatcgccgtccgcgtcatcgttgttgtcgctgcccaagtaggcggagatgacctgcgggttgttggcgatctcctccggcgtgccggatgcgatggtgcggccatagtccagcacctggatgcgctggcatacgctcatcaccaggctcatgtcatgttcgatgagcaggatggcgataccgaaacggtcgcggatcgtgttgatgcagtgcagcagatcctcggtttcggtggggttcatgccggcggccggctcgtcgagcagcagcagtttcatgccggtggccagggcgcgtgcgatctcgagcttgcgctgctggccgtacggcaggttggccgcctgggtggtggccagtccctcgaggttgaagatgcgcagcaggtcgatggccttctcgtgcatctcgttctcctgcttccagaagcccggggtgcggaagatggcgctgcccatgtggtaggtgaacgactcatcgaaggcgacgagcacgttctcctcgacggtgagctgcttgaacaggcggatgttctggaaggttcgggcgatgccggcacgcacgacctgataggtcttcttgccgttcatccgggttccgtccagccagaactcgccttcggtgggcttgtacacgccggtcagcaggttgaacaccgtggtcttgccggcgccgttggggccgatcaggccaatgagttcgcccttgttgatggtcatgttgaagttggacacggctttcagaccaccgaaggtgatgccgagatgttcggctttgaggatgggctgggttgcgtcgctcatcgtgaggcctccttcacggtcttgtcgtcggactggtcatgctgcttggcgctggccgcgggtttcgcgcccttgccggcggcgccgcggaacagcatgcggttgaccagacgcggcagtgagaactcccaggatccgaagatgccctgcgggcggaagatcatgacgagcaccagcaccaccgagtaggcgagcatacggtagtcggcgaaggcgcgcagcagctcgggcaggatggtcaggccgatggcggagacgatcgagccggtgagcgaacccatgccgccgaacaccaccatgatcacgtagttgatggagttgagccaaccggccatggtggggttgagcgagccgatgtactgggcgaagataccgccggcgatgcccgcgaagaacgcggagatcgcgaagacgagcaccttgaggtacgtggtgttgagtccggaggcgccggcggcgatctcgtcgtcgcggatggccttgaccgcacggccgtaacgggagcggccgaacatgaagagcacgaccacggtgaccaccatgatccagaacacgacgtacaggttggcggtgcgttcgatgccgatcagcgcctgtccggcggcgcccttgtcgaggcccatgccgccggctaccttgaggttctggatgatcacgcggatgatctcaccgaagcccagcgtgatgatggccaggtagtcgccgtgcagtcgcagggcaggaatgccgatcaggatgccgaacacgcaggccaccacgccgccgatcagcgtggtgagcaggaagcgggcggtggggtcgatggcaatgccggcggcgaccatgtatttggaggtcagtgcggccacgtaggcgccgatggcctcgaaaccgcagcatcccagcgtcagctggccgagcacgccgatggtgaggttcagggaggtggtcatgatgatggcgatgcacgcggtcatcatgatgcccttgatgtaggagtcggccaagccggattcgcacagcgccatcacgatgccgaacgcggcgaggatgccgatgaagcacacaagataggactgtttggtggaaagcattgtcttcttcatctgatcagaccttctccccttcgttcttgcccataatgccggacggtttgacgagcagcacgatgatcaggatggcgaacacgatggcgtcggagaacgccgaggtgatgatgcccgccgtgatggtgccgatatacgccttggtcaggctttcgatcagaccgatggccagaccaccgatcatggcgcccgggatggaaccaatgccgccgagcacggcggcgacgaacgccttcaggcccagcatggcgcccatcataggcgagacctgcgggtaggcggcgcagtacatcagcgaggcgaccgcggccagaccggagccgatggcgaatgtcagggcgatggtggagttcacgttgatacccatgagcacggcggcctccttgtcttcggagacggcgcgcatggccttgccctgcttggtgaatttgacgaacagctgcaggcccaccatgatgaccaggccgatgacgatggtcagcagggtgtctcccggcagcttgagcttgccgaacgcgatggacggcaggtggaagatggtcgggacggtctggaagtcggcgccgaagatggcctgtgagccgttctccagcagcaacgacatggcgatggcggtgatcagggcggtcatggagttgcccttttcacgcaccggcttataggcggccttttcgacgatcacgccgacggccacgcataccaggatggcgggaatgaccgccacccaggcgggcagtcccatggccacgatggccggaatggtgagcatgagcacgtaggctccgaccatgatgaaatcgccgtgggcgaagttgatcagtcggatgatgccgtagaccatggtgtagcccaatgccaccagcgcgtacacgctgccgattttcagaccgttgaacagctggctgatgaacatgatgatctgatcggtcatagctccccctttctatcaatgttgtggttctctaccgctgcgcgcgaagagatattcgtatgtcttgcgattgatggcgcgatacgcctgcgcctggcgatatccgcatatcgacggctgtccttatgcatccgagcccatgaaaacacgaaagggagaggaccggcaaaaccggtcgctctcctgttcatgcggaagtcatgctaggacatcgtgattatgcggtgggaattcatggaattcacttgggctgcacggtggtgttgtacaccggcttgccgtccttcatttccagcacggtcacggacttggtcggcgagccggacttgtccatggtgaacttgccggtcacaccgtcgaaggtcatgccggccacggcgttgcgcacatcctcacgggtggcgttctcgccagccttctcgatggcctgcttgatcatgtagatggtgtcgtagcccagagcggcgaacgtgttcggctcggcgttgttcttggacttgtaggacttgatgaagtcctgcaccttggtgttggtgttgtcgtcggcggagtagtgggtggtgtagtaggtcttgttgtactgggacttgtcaccggtgagcttgaggccatcgtatccgtcgggtcccatcacgtagccctcgaaacccacggagcgggcctgcgggatgatgtacgggccagccacggagtagtagtacggagcgtagagcagctcggcgccggaagcctggatcttctgcagctgggcggagtactcggtgtcgtcggcggaggaggagctttccttgtccaccacttcgaggccgagcttttcggcggccttggcgaaggcctcgcccacgccggaggagtacggatcgccggtgccgtagagcacggccaccttcttgaccttcaggttctcggcggcgaagcgtgcagccacctcaccctggtaggagtccttgaagcaggtgcggaacaggtaattgccggtttcgatggagtcggaggtggcggccggggcgatggtgaccagcttggactggtcggccagcggggccacggctgcggtggtggcggaaatggtcgggccggccacggcgagcacgttgttgtcgccggcgagcttgttgtaggcgttggaggcttcggtggcgtcgcccttgtcgtccatggactcgagcttgaccttcttgccgttgatgccgcccttggcgttgatctcggagaccgccagctcgaagcccttgacctcggcctcgccgtaagcggcggcggtaccggagttggtggtcacggtgccgatggtgatggagtcgccggaggccttggcactggagctggaggaatcatccatgctgccgccggagcagcccgcgagggacaacgccataacagcggccgcgctggccgcaacgaacttagtggagaacttcacgttcatcctcttccttcttccttgggatatttcaacatcgttcatctgtcaaccaacgcgcgggatgtgcgcgtgagacgttccactcacataattcgcataccacagaactacatcacacggcttgtgaccgtcattcacgtctctctcatccgatgtttgtcgcggactgttataaccagaccggctttgaacccgcaataaattgttcttattatgagacagcgcaattacggaaacgagaatacaatcccaaggaaatgtgggattcgtggggcttaggacactgcaaacaggtagcggtcgcgacccgtccagtcctggccggtcgatgcggcagcgaatccggtggccctggcaaaggccacgagacgatccccctgggtcacgtcatgttccatgacaagcacgcccccaggcttgagaagacggcaggcccgctcgataatgcgctcgggaatcaacgtaccgtccatcgagccgccatacaaagccaattccggatcccaatcacgcacttccggctgctcgggaatatcggtctgcggcacgtaggggggattggtgatgacgatatcgacggtgccgtccaattgggccaatgtggcgaaggacgtggcatccgcgatttccagatggtaattcgaggcaatggatgggtactttttcgcggtttccgacagattccttcgcgtccattcggcggtgttcggcgacagctccaccgcccacacctggctgccgggcacctcgctgacaacggacagcccaatcgcgccggagccggcgcacaaatcgaccacacaaggatggatcatgccgttttttgtcagccagtcaaggccggcctgcaccacggtttcggtttccggacgaggaatgaacactccgggaccgaccttcaggtcaaggtagcggaaaggagcatgcccggtgatgtattgcagcggctcgcgcttggcacggcggtcgagcatggcacggaagacggcaagctgtccggttgtgccaagttcctcccccataagcagagccctgtcgacgtcgcgcagttcaacgcctgccgcctcggcaaggagcaacttggcatcatgctcaggcgtctcaatacccgcttcgcgcaattgcgaagaggcttggttgatgatgtcggtaataagcactggcggtctccgttgatcggacattaggctcccctcagtcagcttcgctgacagctcccctcacagaggtgagccatccggcaaagtcatttctgattggccagacggtcggcttcgtcggcttggatgtcggaatcgatgacggcctgcaggtcgccgtcgagcacggcgtcaaggttgtaagccttgtaattcgtgcgatggtcgacgatacggttttccgggaagttgtatgtgcggattcgctcggagcgatcaagcgaacgtacctgcgagtgacgcatgtcggcggcctcggcggcctcctgctcatgcttcatggccagcaggcgggacttcagcacgcgcaacgcggcggcacggttctgaatctgcgacttctcatcctgcatgttcactgtgattccggtgggcaggtgggtcatgcgcacggcggaatacgtggtgttcacggactggccgccggggccggagctcatgaagatgtcgattttcaggtctttcggatcgatctcgatctcgtcgtcatcctcgtcggcctcggggaacacgatgacgccggcggcggaagtctggatacggccctgcgattcggtgacggggatgcgctgcacacggtgtacgccgccctcgtacttcatcgaagcccacacgccgtcttcgggagcgggcgtgcccttggcgcggatggcgatctgcacgtccttgacgccgccgagctcggtggtgttctcggattgcacgttcacgctccagccacgcttctcggcgtaacgggtgtacatgcgcagcaggtcgccggcgaacagtgcggcttcttcgccgccggtgccagccttgatctccatgatggtgtcgcgcgcatcatccgggtcacgcgggatcagcgcggtgcgcagcttctcctcgacaccgggcagttcggcttcaagacgcttggcttcctcggcgaagtcggcgtcctcgccggccatctcctgagctgctgccagatcgtccttcacctgcaaccaggttttgtaggcacccacgatggtacccagttcggcgtgacgacggcccagcttgcgcagcttgtccgggttggacacgacttcggggcttgccatctgttcttcgatggactggtactcctcaagcgcggttgccgccgccgggaactgttcgtctgccataacacactttcttctgcatggtgctgttctgttcgattattcgattgcgcaggtcaatgctgcaacaaaactcgtcaaagaatacaaaaaacgccagtcctcgatcgggtatgccggagcatgccaaatctaatcggactggcgtgaagtatgctacttgctcttcttgccgtagcgcttctcgaagcgagcaacgcggccaccggtgtcaagaatcttctgcttgccggtgtagaacgggtggcactgagagcacacgtcaacgaacatgtgatcttccttgccagcggtgcgggtcacgaaggtgttgccgcacgagcacgtcacctcaacggggtggtaatcaggatggataccctgctgcattttacgtctcctatggattcgggggacccgggtcgtcatgcccctatggcaagacgtgaaccggaacctaagggattatacgcgcctatctggacgtgaagacgcgctgcgacgccgcaggagacgacgcaaaagagtggggccgcaggggcttgaaccctggaccgggcgattatgagtcgcatgctctaaccgactgagctacggccccacgttcgctgcacaaaacagccaacttgccaaagtgtagcacgagcccgctaacgccggcacgcgcgccatgcacccataccatgtacccataccatgcacccgccagcaacaagcagcatctcccggcgctacttctcccccatgtaccccaacgggttctcgatgaaccgtcgcaagcccatttcggccgcgccatatagcgagggatgcagcgccaccggcggcacaaacacacgaatcttcacattcgggtatcccagaatttccgaacgcagccggccttcaagcacggtggccagctcgtcgccgaagtgcgtccacagtccgcccaacagcaccgtatcgacatccaccagattcacggcggaagcgatggcggaaaccagcgcatcggcggcctgatcgaccactttggccacatccgaatccccggcgcgccaacgctggaggaacatatcgatggcctcgctgctggtggcatccccatcctcggcaatgccggcagcctcgaccaaagcgcgacggcccgcaaacgcctcaaggcacccgtgacgcccgcagctgcacaacggcccatccatcgccacggacagatggccgatctcgccggcgaatccgtgcgagcccatcaccacttcgccgtcgcgcaccaccgcgccgccgatgccgatatcggtagacaggtaaataaaggagtccgtgcggtccaccacattcaggaaggacgcacgttcggtggcataccccggaatctgagcgatggcggccatcttcgcctcattgccggccaccacatccagccggcgcaccacgttgaaccgggtgagattgacgttttcccaacccagattgcgggccaccaacagccacatgtcgtcggtgacgatgcccggcagcgcaagcccggctcccaccaccttgcagccgcgtcgtttgagtcgactctccaacgggaaggccatcgcatcgagcttggcgaagatctcgtacggatcagtgccggtcatatcctcactcacccactcccgaccgagagtgtcgccgttcagatcgagcgccaggcaaccgtagccatcggtgttgatctgcagaccgatgccggcgatggacccgccatgaatctccagcggcgtgctgggccgcccatatgtggtggaaacgaccggctcgccttcctgcaccacgccgctttcaatgagcatcgaggccaacagcgagagcgtagccttggtcaggcccgtctccttggccagatcggcacgactcatcggtttctgcgcacgcaacaaggtgtcgagcgtcaccgacaggttatggttgcgcagatcctcctgattgatcctgcgtagatttgccattggcccctacctcctcgcacccttagtctcgagcgccgcacaggcgctcacatccgtctatcacaccatgatattgtgcgtcaaacgattgaatcggaccgcaccttcgcgtgtttccgtttgcaatcgaacgttgagatacagtatagtttaatggtctaacttattggctatggcgcgccgaaacttttgagcgcgaccctcatcgaggaggaatgcatgacgagagtactggttgccggcgtagatacgtcaacccaatcaacgaaggtccgtatcgcggacgccgccaccggcgaacaggttcggttcgggcaggccaagcacccggatggcacctcggtcaacccggaattctggtgggaggccttcaccaaggccgccgagcaggccggcgggcttgacgatgtcgcggccctcgcggttggcggccagcagcatggcatggtcattctcgacaagcagggcaacgtgattcgcgatgcgatgctctggaatgacaccagttccgccccgcaggccgccgccttgatcgacaagctcggtgcagctccggccgagggcgacgaaccggacgacgtgaccgcccgcggcaagcaacgctgggtcaaggccgtcggatcctcccccgtcgcctcctacacgctgaccaaggtggcgtgggtggccgagaacgagcctgagaacgccaagaagattgccgccgtctgtctgccgcacgattggctgagctggcgtatcgccggctatggcccggtggccgagggcgaggacgctcatctcgaagccctgttcaccgaccgttccgacgcttccggcaccatttactacgatgccgcgcatgacgagtaccgccgcgatctcatcgccatggtactggcccctgccgagggcgaggaagccgccaaggcccacgccgacgccattgtgctgcccaccgtgctgggcccgcgtgaggcagccgccgccaaggccgaccccgccattgccggcaaggacgttgaaggcggctgcatcatcggccccggcggcggagacaatgccatggcctcgctgggcctcggcatggccgtgggcgatgtgtccgtatcgctcggcacctccggcgtggccgcggccattgctgaaaacccggtgtacgacctgaccggcgccatttccggctttgccgactgcaccggccactatctgccgctcgcctgcacaatcaacggttcgcgcattctggacgccggtcgcgccgccctaggcgtggactacgacgaactggccgaactggccttcaaggccgagccgggtgccggcggcatcaccctggtgccgtacttcgacggcgagcgtacgccgaaccgcccggacgctaccgcctcgctgactggcctgactctgcacaacaccaccaaggagaatctggctcgtgcattcgtcgaaggcctgctgtgttcccagcgcgactgcctcgagctgattcgctcgctgggcgccgagatcaaccgcatcctgctcattggtggcggcgcgaagtccgtggccatccgcacgctggccccctcaatcctcggcatggacgtgacccgtccggccaccgacgaatacgtggccatcggcgccgcccgtcaggccgcctgggtgctgtccggcgaggccgaaccgccgacctggcagctcaccatcgagggcgtggagaccggcgagcccaccgaagccgtgtacgaggcttatgccaaggcccgcggctgatacgctgccagcaaatccatgagataacaactgaataacgattcctgatgaatgccgccatggcgagcatcgcgaagagccgctgttataccgcgctcctcgctgaagcacacatggcggcatttttcgtttcccacgcaatccacaaatacggctataatcaagtcgtttgaacaagtctggagatgatcctatgaacgaccgctcccgtatgatgctgtacgccctgaccgccgtcgcctgcgtgatgtggatatggcagtctgtcaaagagtcgatgaacgacggcacgatcatcagcacttcgaacatcatttttctggtatgcattggcatcgcggccatctactgcgcggccaacgcgctaatcctgtggtggcgccagcccggcaaggatgacgcggctgatgacgacgaaaccgacagcacggacgccgaggccgaagccgaacaagccgaagaaaacgaacacgacgacgttgccgacaccgcagacaccgacaccgcagacgccaaagaaaaccacaacccacagcactaaaggaacatcatggatgcaaccacattgtcaataaccctcagcgcgatattggccgtcatctgcacaccttgcggcctgtttctggggcttgttcccatgaaggccgacctggtgaccgccaagcagtcaaaggcctcgcagatggtgagcttcatcgttgccatagtgttcatcggcttgctggtcgcaggccatgatctggagacctgggccatggtaatcggtctggtcatcggcttcgccgttgccaagatccccgcactgcacgcctgggctttgcacaagtggccgttcttcgaacccaagaaaatggctcccacccccaagcgcgtcaagaaagccaggaagaagtaagctctggccttacctattcgctgaaagcgggatatcgacatcggtatcccgctttttcattggccgcacatatccgctgaggcacatcgccgaatcatattgtcgaaatacaccccaagtcagggctgatttcgcgaagaacgtacaccgggatccatccatcgcgacaaacggaaaagggacgctgcgtgcaacagcgtccctttcggaggaggaatggaactcaggtccatccccgtggccaccggacgggcccggaggccaggtttagctcagcctttctttttcttggagagcaggtcgtaggcgacggcggcgatgacgacgaggcccttgatggtcttgacccaggcggcgtccacgcccatgatggacaggccctggttgagcacgcccatgatcagggcgccgaccatggcgccggggatggtgccgatgccgccggtgacggccgtgccgccgatgaagcaggccgcgatggcgtccatctcgaactcatgccgggcctgtctcgttaagtgtgtaactggcgttttcattgttgtgttccctcgcttggccagcggtcggcgaaggtgatggcaaaggcgttgagcacgggcttccagcgcgcgctccatcgtatccgtcccttgccggtggggtccagcgagcggacggtcaggtacatgcacttgagcgcggcctgctcgtcggggaagtggccgcgggcgcggatggagcgcttgaatctcgcgttgagcgattcgatggcgttggtcgtgcagatcacgcgccggatctccacgtcatagtccaggaacggtatgaaccgttcccacgcgtccatccacagcctgcggatcgcgggatatctcgcctcccacttgtccagcatcgcgtcgcgggccgccgccgcggcggcggcgctcggcgcggtgtagatgggtttgacatcgcgtttgatggcgtcccagtccttcttcgacgcgtagcggaacgtgttgcgcagcagatgcaccacgcaggtctgcacgatggccagaggccataccgcgcccaccgcgtcgggcaggcctttgagcccgtcgcagatcaggaagaacacatcgtccacgccccggttcttcagctcggtgagcaccgacagccaatagcgtgcgccctccgcggcgggcgacgcccagatgcccagcacgtcgcggccgccctccagatccacgccaacggccacgtagaacgcgcggttggcgacctgcccgtcgcgcaccttgacgacggtcgcgtcgatgaacacggccgcgtacacacgatccaggggacgcgagcaccattcgtccttctcggccacgacccgctcggtgatgcgactgacggtctccctggacacgtccgccccgtagatctcctggaagtgggcgctgatctcgccggtggtcaggcccccggcatacagggacagcaccacctcgtccaccccgggcagccgccgctgccgtttcctgacgacgaccggctcgaacgagccatcgcggtctcgcggcacctcgatcccgaccggacctaccgaatcggtgaccacggtcttggcggtggtgccgttgcgcgtgttcgcggccctgccgtccttggatttcttgtgcttggcgcggcccaggtgctcggtcatctcctcgtccagggccgtctccagcacgcttttggtgaactgtttgagcagtccgtcgggccctgtcaggtccagtcctttttccttggccatgcgcacgaatgtgagcgccgcctcccgctcggcgttgcgtttttccgcgtccggcttcttcgtcggtgccatgtttccccttgtcccagcagacatcgtccaccagcctttccgaccggccacacgaccggccagttaaggccagtcacacacttcgagagacagtcccgttttcagcggaaggagagaaaggagaaagaaggaatggaaaggtgccatgcgggcataacacaacaccgcacatggcgaaattatcgaatcagcccatcgggcgcactggcatcataattgatgtgtacacgcccgatggagcgaattcaatcggtcagaccgatggtcactcgacctcagccagggcatcaatgatgtagttgttgatggtggccttgacggactcgaggtgatcggacttggtggcggcgatgagctcggactgcggcttgtcgaggctgtaggcttcgaggtcggccaaggtgacgttgccctcgtcgatgtccttgccgatgccggagtcgtaggagctgtagcgctcggcctgaagattctggatgaagccgtcctggttcatcttgtcggcaaccagcaggccggcggcgtaggcatccatgccagcgatgtgggagcggaacaggtcctcctcgtagaaggaggtacggcgcggcttggcgtcgaagttcagaccaccgtgaggtccgatggagccggcctgcaggacttcccacatgacggcgacggtctcgtacagatcggtcgggaactcgtccatatcccagccgatgagcttgtcgccctggttggcgtcgagggaaccgaggaagccggactcgcgggccacgcggatctcgtgctggtaggtgtggccggccaggttggcgtggttgccttccaagttcagcttgaagacgtcggtcaggtcgtggttgcgcaggaactcgatggcggtggcggcatcgaagtcgtactggtgcagcgtcggctccttcggcttcggctcgatcaggaactgggcctcaaagccgatttccttggcgtaatctgcgcacatgtggaagaacttggcgatgtggtcggtctcgcgcttcatctcggtgttccacaggttctcgtagccttcgcggccaccccagaacacgtagttctcggcgcccaggcgcttgccgatctccaagctcttcttgagctggccaccggcgtaggcgtagatgtcggcgaacggagaagtggcggcgccggacacgaagcgcgggttggtgaacagggaggaggtgttccacagcagcttgacaccggtggacttcatattctcgtcgatcttgtcaacgaccttgtcgaggttggcgttggtctcgcgcagggtgtcgccttcgggggcgatgtcacgatcgtggaagcagaagtactcgacgcccagcttctggaacagctcgaaggcgtagtcgaccttggccagagcctggtccatcggatcggtgtacttgtagtacgggcggtgcgcggtgccggtgccgaacggatcaaccagttcctggttgaaggtgtgccaccaagcaacgccgaagcgcagccaatccttcatcttcttgccggcaacgaccttgtcggcatcgtagtaatggaaggcgaagtcttccttcggtcctttggcgcggccgacgtactcgatcttgtcaacatcccacagacccatttgggcgctcctttgcagtaggcgatattacggattgcaggaccaataataaaacgaacgaactaagtttgtcaaatgattgaattaatacgccgcgtctcagcgtgttgctagtcattgcaatggttttcgaatgcagtcaaggcacagatagtatgggcaagccaagaaagacaactcagccaagaaaacgagacttgataattgacgtcacgcaattcctcgccggccaccgctgaggccggctccaccaccccgccaactccaacagcaccacccccgccaacaccaccgccatggtcatcaccctgatgatcggctcgtttgtggccatcctcaaccaaacgctgatgatctccgccctgcccacgttgatgcacgagttcgacgtgcccagcagcaccgtgcaatggctgaccaccggattcatgcttaccaacggcatcatgatcccgatcaccgcgttcctcatcgagaccttcaccacccgccagctgttcctgtacgcgatgggcatatttgcagaatgatcttggcgttaatgcactggtgtccggtttggtgatgatgccgagcggcatcgccatgggcatcctgaacccggtggcaggcaagatgtatgaccgtatcggtggccggccgctcgccttactgggcttcgcgatcatgacgtctgcggctgtgctgctggtcaccatcatgaacacgcacaccgcggcggccatgcgcaccggagtgccggaagcggcggcatcggccattggcgtgcgggcttcgttccgcacggtcgccattgtgtgcgcggtctgtttggttgcgtcactcttcattcgtgatcgcggccgccgacttggacagcagcgttaggcgaatccttcaccgattgctggccttcttgatcagcgcgcccaaagtaccggcttggcgcgcggcttccacatcttcccagtcgagaccggtgtctttggccctcccgtagaaaaaccgcaccagaccggcaaagtccggtttatatccggtttcccggaatgaacgggccagcgaatcaccgatttgcgggtcatcaggccttcgtgcctcatagatcgggatggaacaggatcgccacacgcctctcacatgtgcgatgcgattgacgatcatgccgccgtgcgcaccatcgtattgcgaggcggcatgtacgtccgccacctcgtagacaccaccatgaatgatgtcctcaactgtcagacgacctttgaccgcgctggcatcgcgaatccagaacatcgaagcgaaattggtgtcatcaaattcgcgaaaatcacgtatctcgcgtgtgccgatacgttcgtccttgtcatacatgaattcggccaaggctaggaatggcgagatacctgcgcccggaccgtactgcaattcgatacgtaaatcttcggattcattgccggtcagtccaataccgctgacggcgcagtcataggcaaaccaatcccagaaccaccattcgatcctttgcagcacctgcttcggatactttttgcatgggttcagattcacttcgcgataatatatgcgtctcgcttcggcatagacggcgagattgcagcgtttgaacatctcggctacgtctttggtgtccagcattgctggcaaaccggcattttcggcagtagtagtggttgcggtgctcatggtgtttccccttcatgtgatgtggacggcgggctacgttgcccgccgtgaggcacactgtatgacgttcgtgcggtggctcgcaagcccacatggcgagatggtggataagtggaaaacccaatgattccaaggggtatggaatgtgcataacagtggctaccgtcggtggataaccgcactttcttgcaggttatccactgatcgcgcagctgttatccaccgtctctgggttatccacatcgtctctggcgtgtcgtccactgtcagcagtcgatttctgcttcgtttggcgtgtataagtgcacggtgaagtgtataactccgcgcattaggcatatttgctactgagaaaggtcccgaaatcgccttcgaacgcatagctacactcagcagatgtattcagcatggcaatagacccacttaggcaccggcgaatgattttccctcgcttatagagtcggcaaaggcccaacacctgtcccaacgccgacgctactgcactggcagcgtcggcagaggaccacaacttggcacagcaacgacgctaaaaccgcccagcatcgttacacgtccaagttttggccgctaacgacgcttaatgaacgcttagcgtcggcagcaggtcacgcactggttctccaccgacggtaacgctccttagcgaagccagcccgccactctttggcacatcaccgacgctgagagaacctccagcgaagccaaccagccaaccgctggcaacatgacaccacccacgcccctcagcgaagccaacctgccagcgcatggcaccccaacaccgatgagaacacccaccccaccagtgcacaaaaaggctggtcatagcggttgcgatgtaatcgcatcgtaatcgcgatgaccagcctcgggagttgggctgcaatgagcaccgatatgaatcagataatgatgccgttgcagtgatcgacttcatgctggataatctgcgcagtccaaccggcgaaggtggcgtggcgggcgcggaaccgacggttctcgtagttgacctcaatacgtcgataacgcagcgtgcggcgttcgccggtcagggacaggcatccttcctgggtatcgaaggcaccgtccgaagcggtgatcacggggttgagcatcaccgtgatacggccaccgagatcttcgtccacgaagacgatgatgcgcttgctcacgccgatcatgttggcggccatgcccacgcaccgtgaacggttggcctccaacgtatccacgaggtcctgaatagttgcctcgtcgccgggcccagccgcttcagacggcgtgcgcaaaaacgaccgcgaagtcataatagggcgttgcatgttggaatcacgcttcttcgtgccagtgggggttctggccgaaggtgtggccttcggggttgtccatcgcggcgatatcggccatgtcctgatcatcgagctcaaaagcggtcaggtcaaggttctggcgctggcgttccgggttcagggacttcgggatggccacgtcgccgtattggaggtgccagcgcaaaatggcctggaccacggaaataccgtgcttggcggcgatgcgcttcagatccggatcgcgcagcatctggttggcccggcccagcgggctccatgcctcggtgatgatgccgtgcgcattgtcgtaggacagctgttcacgctgctggaagtacgggtgcagctcgacctggttgacggccggcgtcacacctgtatcgcgaatgagcaggtcgatgtggccgggcaggaagttgctgacgccaatgtgcttgaccaagccgcgttcgcgagcttcgaccagcgcttcccatgcctcgacgaactggccttggcttgggttcggccagtgaatcagatagagatcgatgtagtcgaggcccatacggcacacgctctcctcaatggtgagcagagcctcgtcgtgagcatggtggcggccgggcagcttggacgtgacgatgatgtcttcgcgcggcacaccggattcgcggatagcgcggcccaccacgccttcattctcatagttgaaggcggaatcgatgagtcggtagccctgatgaatggcggacttgatggcgtccacgccggccaggccgttgaccttgtaggtgccgaatccggtggctggcagttcgaggccgtcgttggccttgcggatcggagtgaccggtggttcaagcatgatagttctcctgcttctcctgtgatggcatatctgttccatcataaagccaaccaatccgctgcgggcatactatttgacttccctcatttccggcgggcggcgagtggagaatcggaacatgagcgaggcgaggatcacgccgagcacggccatgccggcgaacaccatcatgctgcgtgggaaggcgatcatatacgaaccggcggcgtctgccccatcgttcgcggcgatggccaccacccacacattgccggacagcgtcacgaacaccgcgtccatgattacggtgcccgcgaagccgatgatgatgaacttgggcgggaagtggctcttcagcacgccgccgaataccgggccgatggccggtgcagcgcaggtgaccagactgacgatgccgagcatcgagccgcgctgttcaagcggcgcttttccagaatgatgctggtgatgagcgacaaggagatgccggtgccgagcgacatgaccagtcgggcggcgagcagcatcgggaagttgaccgcgagcgcgcccagcagtgtgccggcggcgaagatcacgacggccatgatgaacagggttttggtggcgaacttgcgcaccatgaacggcgagctcgaaatcgatactgacagcaagagcagatagccggtggtgagccactgcaccaccgaagcgccgatggagaactcctccatcagcgtggagtaggcgatgttcagtgaggtttccgacaggatgccgaggaaggtcagaatcgcaagcgagacgaccgcgatgacgagcttgccggaaaagggttgtttgccgccgtgaggtagttgtgttgctgaatcagtcataatcgttgctctcctccattcattcacatgcttttgcgatgctgcgcgtcttcctgcataagccgcagggcttcggtcaatgtgcgcacagtggtttcgcattgttccacggtcagcccgcccaatagctggctaagatgcgcatggtattcctctacgtaaacgcggcggatatctagtccacgctcggtgagcgtgagcgtcaccgcacgccgatcggcggcatccatatgcttgaccaccagaccaagctccaccatctcgccaacgagtttggtaacgctcggcgtagtgacgccgagaaaggcgctgacatcgcttacccgtgcggtgccgatttcctgcccattcgtttcgttgatatgccagacggcgtcgatcacgtggacatagcgcggtttcatacctttcggcaatgccggcatcagttcggtgatggtcttggccttccagcagacatccaggaggctccgcacctcattcaccggaagcaagccggtcttggtatcggttcgggaatcgcacatcgctggcccaacctccaattagttaccaatagtcattaccataagtaactatatgcaggctctagacaaacccaacggcctgcgcgcccgtgtcgagttccgtttcgacataaaaaagccagggaatccctggcttgcaatgcacatatcgctgcagatttgccgggacctatatgtccccggcaacaacagccgtatatacgctaccgatcagtgctgccctcatcatccttggcacctgccgtggcggcctcagtctccttggcgttccacccggcgacggcattccaaccactccatccgatgaccactagcaagcacagcgagaagacaatagtggcccaattgaacagcgagccatcgttattggcctcgaccagtgactgccagagccagataacgcaggccaagcaggtcaatgcatacatacgggaggtggagcgcgcggtgagtttcatggcggaaaaagtcctttgattacaagaatgacggcagataacagtgtgggatccgcaccagcggcaccggcacgaatcccacatcgaggaggagaaaggggaaggtcagctcttcttgcgcttggacatgatgtccacggcgacggccagcaggagcacgaggcccttgatggtcttcaccacggcggtgtcaacacccatgatcgacagaccctggttgataacacccatcacgaatgcaccgatcacagcgcccgggatggtaccaataccaccggtaacggccgtgccaccgatgaagcaggcggcgatggcgtccatctcgaactccataccggcctgagcagttgcggaagccagacgggagagcatgcagacagcggccactgcggacaggaagcccatgtggacgaacagcaggaagtccacgcggcgggtgttgataccggagaggatggcggccttgcggttgccaccaacggcgtacacgtggcgaccgaacacggtcttggtcaggatgaagttgtagatgaagaccagcacaccgacgatcaccagcatgatcggggtaccaccctgatcagcgttaccggaggaagccagcaggtaggtgacgaaggcgatgacgaccgcggcaagcacaattttgaggacggtcaggctcatcggctcgggcaccaggccgaccttggccacacgggcgcgcttgcgcagctggctccaggcaaagccgacgatgcacaggatgccgagcacaatggtcagaccatcgaacggaccccaccagccaaggatgttgggcaggtagttacgggcaatgccacggaattcgagggaggtaatcggcacggattcgccgacgatcacggtggcgagaccacggaagatcaacatgccggccagagtggtaatgaagcccgggatgccgatgacggcgacccagaagccctgccagacgccgacgatcaggccgacgaccagagcgatgacgatggcgagcatccagttgactccggcgcgttccatcagcagtgcacacacaccaccgatgaaggctaccaaggaaccaaccgaaaggtcaatgtgggtggcgatgatgaccatcaccataccaatggccaggatgatcacgtaagcgttctgctgaatcagggacacgaaggagttcggcttcagcagcacgcctccggtcaggatctcgaaggccacgacgatgaccagcagtgcgccgacaataccgtattgacgggcattgttggcaaccgtggccagcaggccggtcttttcttctttctttgcaggtgttgcagttgcggcgctcatcaggctgccacctccctttccttggtcatacccttcatcaggtattcctgggtaaatccattcttctcaacattgtcggtgacgacaccgtaggacaccgtgtaaatgcggtcacagataccgatgagctcgggcagctcggaggaaatcacgatgacggccttgcctgcatcggcaagcttatcgatgatttcgtagatctcatacttggcgccgacgtcgatgcctcgggtcggctcatcgaggatgaggatgtccggctgcgagataacccacttggcgagcagcactttctgctggttaccaccggagagggtggagacattcacatcgatgtcatggcacttgatgttgaagtccttgcggtactgttcaacttccttgcgctcaaggttgtcgtccacaaccccgcccttgctgatcttggtcagggaggccagggacgcgttctctcggatgttctgcagcaggttcagaccgttgcccttacgatcctcggtggcgtaggcgagacctgcgtcaatcgcggactgcacgttgggcatcttgacttccttgcccttgacgaacaccttgccagagatgttggaaccgtaagagtggccgaagatggacatggccatttcggtacgacccgcacccatcagacccgccagaccgacgatctcgccggcatgcacgttgatgttcgcatggtctacgatcacgcgctccgcgtcgagcggatgatgcacggtccaatcctcgacacgcaggtattcctcgcccggggtattggaggggtggttcgggtacaggttgtgcagcggacgacccaccatcttgcggatgagttcttcctggtcgagcggcgtctccggcgtcacgtacatcacaccgacggtcgaaccgtctcgaatgatggtgacattgtcggcgatggcggcgacctcgttgagtttatgagtgatgatgatgctggtcacgccctgctcgtcacgtagctgacgaaccaggtcaagcaggtgggcggaatcctcatcgttcagtgcagcggtcggctcatcgaggatgagcagcttcacgtccttggacaatgccttggcgatttcgacgagctgctgcttgccgacgccgatgtccataaccttggtatccgggtcttcgggaagtcccacacgatcgagcagcttcttcgcctcggcacgggtcttgtcccagtcgatcacgccacccttggcctgctcgttgccgatgaagatgttctccgcaatggacaggaacgggctcaacgccagttcctgatgaatgattacgatgccgtcggcctcggaatcattaatagtatggtatttgcattccttgccatcaaaggtgattttgccggaatagctaccgtatgggtacacacccgaaagcacgttcatcagggtcgatttgcctgcaccgttctcgccgcagatggcgtggatctcgccgcgatcgacggaaagattcacatcggtgagggctttgaccggaccgaacgtcttcgtgatgttttccatcgtcaagatggtgtcatttgatgacatgtcaccactcctcgtcacagttctgtgttcatggacatgcggcgcatatcggctatgcgccgcatgtcattgtgtttgtttacggattgcctgatgaggactacttagtcagctcgtcgaagcgatcctgggtgatgtagttggccgtgaccagatcctggaggttgtccttggtgatgttctgggggtcaagcagcttggacgggacgtcgatgttgttgttgttgaacttgccgttcaggccggagacttccttgccctcggcgatctcgacgaccatgtcgtacacggcgtcagccagcttgttcacgtccttgaacacggtctcgccctgcttatccttggcgatgttggcaactgcgatctccatggcgtcctgaccggtgatgtacggccaggagtcggtgcccggcttcatgtcgggacgcttggattcgatggcgttgatcacaccctgggcgatgccgtcgtacggagtgaggaccgcgtccagcttctcgccgtgggcgtaggtggagtcaaggatggattccatgtccttctgcgcctgctcggtcttccagctcatcacggagatcttctgccaatcctcaacggtgaagtccttggtcacgccaccctgaccgtgctgggacggggagacgagcacgcccttctcgaagtacggctgcagcagatcccaagcgcccttgaagaagtacttggcgttgttgtcatccggggaaccggtgaacagctcgatattgaacgggccggtggcgccatccttaagcttgagctggtcaatgagatacgtggcctcgagcacgccgacctgctccagctggaaggtggcgtagtagtcgacggcgtcggtgttcatgatcagtcgatcgtaggcgatgaccttggcgcctgcatcgcgggccttctcaacagcggggcccactgcggtgccgtccttggaagcgaccacgacgatcttggcgtcgttgttgaccatgttctcgatgtcagcgttctgctgggccggcttatcgtcggcgaaggacaggatgaccttgtatccggccttctccagcttggccttcaggttgttgccgtccttgttccaacgctcttcggacttggtcggcatcgaaatgccgatagtggcgcccttttcgatcttggcatcaccgccagttgcctggccgctacggctgccaccgcaggccgcgaggcccgcgcacatggcaacgcctgccaccacggcgacgatcttcttagtgaacttcatttgttctccttcatcttcgaggggatggcgaaccctccttggtcgcccgaacctgagaataacctcaggttcatctcatagaataccgtattgagttaagttgtcaaactcaagaaagcgaatttcctgtcgtttatgttcaaccaatgaacgcaatgtcgatttttcgcgcatcacaaggcgacacgccgaaaaatccacgctctgcgcctcgctgtgcctcatgccggtaacgactacactgaactcttatggcaacaaggcttttcggttcgcagacctcgcttcgcgaggcaaaccgcgccaacttgctggccagcatccacaagttcggcgccatgacacaggtcgaactggcagaggtgacaggactgtccactgcggccgtgtccacgctcgtccatcagcttgtcgacgaagaccagctggagaccaaaaacaccgttcgcaacggtcgcagagccactctggtgacccttgcacggcatcagggcctcggcgtcgggctttggatcgcgcgacgtcatcttacgctttctatcgttgacttctcgaagtcaatcatcgctgagcacacgctccccctgccgttgggccacaaggcggacacaacgctggaacgcgccatgctgctcatcaatgagaccctgagcagcatcgacgccgaagccagcgagctggtcggcatcggcgtggccgtggccgcaccggtggccaccagcgaccacaccatagcgattcccggcattctgcccggatgggacggcgtcgatatcacggccccgttgcgcacggcgttcaacgttcccgtatacgtcgataatgacgcgaatttcgcggcatacggcgaatcccgtatgggcgtggcggcaggcaaacgcaatttcgtatatatctcagccaacgacggggttggcgcaggcatcgtcatcaacggcgaaatcatgcatggcgtgaccggcctggccggtgaaatcggccatatccaggtcgacccgctgggtgccatctgttcgtgcggcaaccgcggctgccttgacaccgtcgtggcggaaaacaggctggtgcagttgctcagcgtcacacacggcaatatgacgctggatgatctggtgtcctttgccaacgaaggcgaccccggttgccgtcgcatcatcgccgacacggccgtgcgtatcggtcaggtggcggctgatctgtgcatcagcgtggatccggaggtcattgtgctcggcggcaagctggccatgaccggcgacgtattcatccaaccgttcaatgaagcgttgcagcgcatgctgttccctgatgccgtggcacccatcgatgtactcgtgtcatcccacccgaacgacaactgcgcgctaggcggcgcattatgcgccatcgagttctcggttcgcaatgacgtcagccagtgaccggtatcaggagaagagtgagaagaaggaacacaccatgaggaattcgagcacacctcctctgctgcggctggaggacatctgtgtgaagttcggcttcgtcgaggcgttgaaatcggtgaatctgtccatccaacgccaggaggtcgtcgccatcgtgggcgataacggcgcaggaaagtccactctgatcaaggtcatcgcgggatttctgcagccgggattcggccatatctatctcaacggcgaacaggtgaccattccctcgatcagggaggcggaccgcatgggcatcgcatcggtgttccaggggcaggagttctgcgacaacctggacgtggcctcgaacctgttcctcggcaaggagatcaatcagattggcatacgcgatgacgattcgatgaactcgcgtgcccgttccgtgctgaagaccctgagctcggcgattcgggtcggctcccctatcgcatccttatccgtcggccagcgccagaccgtggccatagcacgcacgctgctcaatgacccgcagcttattctgctggacgaaccgaccgccgcactgtcggtgatgcagtcggcggaagtgctcgcatatatcaagagactgcgctccgaaggccggtccgtggtgatggtctgccacgatctgccggatgtgttcgcggtatccgaccgcattgtcgtgatacgtcaggggcacgtcaccggcgtgcatcgaaccgtcgaaacgtcctatgaggagattatcgccgaaatcgccggcgtgaccaccgaacacgagtacgaggaaatcgctgagaacccggaattcgattccatggtcaggcagcggaaactcatcgaccgcactatcagcgcggcagtgagccatggcaccggccatgactcaccattagactaacgtcccgttgccggagcgacatcgtcagcgcagggccaggttggccgcgccgatcagaccggcatcctggcccgcagtggccgcgacgatcttggcatggccgcggtaggcgctgccttccaggaaacgctggtagttgtagcgggccggctccagcaggatgtcgcccacggccaccacgccgccgccgatcacgaacaggtccgggtcaagcacggcggaaacggcggccatggtgcggcccagccattcgccgatcttgccgaacgcatacaggccaagtacgtcaccttcctgagccgcttgggacaccatcggcccctccagtttggtgatgtcgccgccgcacagttccagaagacgcttggcgtcctgaggacgacggcgcacggcggacttggcgaagttctccagcgaggttcccgaagtgtaacgttcggcgcagccgcgcaggccgcagccgcagtggtcgccgtccgggaccatcggcaggtggccgagctcggcggccatgccgaaggagccgcggtagagctggccgttgatcacgatggcaccgccgaggccggtgcccacggtcagcgcgaccatgttggagctaccctggccggcgccgtgcacgaattcgccccatccggcgcagttggcgtcgttttcgacgatgaccggcacggcatggtcgatcagcgcgccgacatgctcggacagatcgtagttgatccatgccggaatgttggcggagaaggtgagcgtcttgcgatccgcgctcacattgccggcggcggagatgccgacggcctcgatatcggtgtgcccggcggccacagcctcgcggtacacctcggcgatgtgctggttgatggcgtcggcgtccatcggcgtggggacgcgccagcgctggatgatgctgtcattttcatcgcagacggcggcggcgatcttggttcctccgatatcaatggcgagcgtggtcatggcttactccttgaagactttcgtaacatgcgagatagcgaaaatagtagcgagccgccatgacttcccaccgcggtttttccgtggtgcgccatgcgtcgcgaacattccaccgatgcgcttcctcatgcatttcacccgttgcaaacgggcgcccccttaacgccggcatcggtgcggacggcgtgtcgaatcggatgcaatcactttcgccgtccttgcggatggcatcgaagaacggcaggaaacaaaaaaactcccgacatgcatcgggagtttggtggcgaccccggccggacttgaaccggtgacctccgccgtgacagggcggcgctctaaccaactgagctacggggccgtgcgtgcctcgctgaggcacaagaggatatgttacagcatcatcggattacgacacgccgtctgatacatcgttccttccaccggcgaaccgaccgcaggtgtggtggacggtatgcggaccatatcgttcgaccgcgcacgaccgcactccccataagacagtagccgtcatgcgtcaacgcacgttgtgcgacaacgcggcacgacgcacggccgccgaggccagtaaaccgatgaacagcatggtgccggcgaccagaagcgtccactgacctccttcgatgaaccctgaagtcatcgcatcggcaatcttcggcgcctcgtcgccgaatcgggccgccggtccatcaccgctgcggaacgcgccgatcactccacccgccgaaccgctgaccgcctgggccagaccgtcgccgaccttggcgggcagcccgagggattcgagccgcgccggcaatgttccgttgacggccatggccaacgacgcgccggagatggccgaaccgacggcggtgccgagctgtcgaaccgtggactgggtggccgacccttcgccggactgcatgatcggcacttcggagagcaccacgctggtcagctgcgcggaggcgaagcccagacccagaccgtatgcggccatgggaataagctgccaccacaccgacaatcccacaggcataaggaccgcgaccagggcgacggcgatgatctcgatcacaagaccgagttgaatcacgccggccggggagagcttggcggccatgacatgggcctgcgcacctgcgacgatggaccccagacccatcacggccagcatcgcaccggcctgcagcgtgttgagcccgcgggcgttgatgaggtacagcggcagcatgaacaccagcgcgaattcgccggcggcgatggccgcagccgccagattgccccacgagaatgtcctgatgcgaaacagggtcatgtccagcatgaccggccgaccggctttgccccgcgccgactcgaagacgatgaaggcagccatcagaagcgcaccggcgatcaggcagatcggcaccggcgacaaccagtcacgattccagctcaacccgcccagcttcaactgcgttgaggtctgcttccaccagccgtaggtctcgccttcaataagaccgaacaccagcagggccgaggtcagggcagacagcaccacgcccggaatatccacaccgacacgacgggatcgggcatcctgcgcggcatccgcggtgccggcgaccgagacgttcccaccggtcttcggcaccaggaagatggccgacacaaagaccgcgatgcccaacggcaggttcaccaggaagatccaacgccatcccaaggtctcggtgaacacgccaccgagcagcggaccaagcgcggcggccgaactcatcaccgcaccccagacaccgaacgccgcggcacggtacttgccacggaacagggcggacaccgtggacagggtgttcggcatgatcatcgcgcctccgatgccctgcagcacacgggcgcccagcagcatccccgcaccctgcgaggcggcggcgagcatcgaactcgccacgaagatcacggtaccgacttgaaacaccagtttgcgccctctggcgtcgccaagtttgccgaaaggcagcaacaacgcggcaagcacgatgttgtagagcgaggtgacccactgggcgtcggtcaggttaatgccgatatcatcgatgatggtagggatggagacgttgacgatcgagctgtcgagcacgatcatggccaaacccagagccatcacccacagcgcgccccacggcggcgtctgggtgggcagcgacgacgaggccgtcggattcgttgaagatgtcatagttgtcggggatgtcggggacgcatcgacttgagtctgacgttgggatcgtgatgaacagtccataacggggtttcctctctgccatgatcgaggcgcctgatgcgcttatccgccgttcacagtacatccgtggcgcggaccgtctcactggatatcaaggaacattccgggcgttcagccatgggcgtaacctcggcggatcaccgcaacggcaccatcggggacggccgcgtcatgccggatcgcgccaggccgcaatccagcccattaccatgtttggtaggtcccgatggtcggggccgggtcgccggttccggtatgactttcctgccctgtcgtcgatgatccggggggtgttgtcgccgggaacggggacgcccgatgaccgctgataggaaccaggccggctacacggacgcttcaggggcgcatggcgcaggtctcgtcgtaatgtgggtgcggcgcgggcgtccggactcctccgagcccgcggcggccggaaaaccttcatgacgggaggaacgatgatgaccccggacgacatcgacgtgtgggtcggcctggacgtgggcaagagcgcgcaccacgcgcacgccctcgaccatgacgggaacaccctgtacgacaagccgttgaaacaggacgagaaggccatccgcacgatgctgggcaagctctccaagcatggccgtgtgctgctggtcgtggaccagcccaacaccatcggctccctgcccctgacggtggcgcggaacatggggatcgcggttgcctaccttcccggcacggccatgcgcaggaccgcgcggctgctgcccggggacgcgaagaccgaccgcagggacgcgcatgtgatcgcgtgggccgcgctcaagctgcccgagacgctcagggacgcgggcccggatgacgagaccctcgccgccctgaagctgctcgccggccacgacgaggacctcgcccacgaatccacccgccacgtcaaccgcctgcggagcctgctgctgcagacccaccccgcgttcgaacgcgcgctcaagggcgagagaatcacgcgcgacgcgacgctcgcgctgctcgaacgatacggcgggcccatgggcgtgaaacgggccgggatcgaggacgtgaaggactgggccaagtccaacgggcttcgcgccggccgcatcatcgacgacatgttcaaggcgatcggcgagcagaccgtcaccgtgcccggcaccctcatggccgagaccatcatcccctccatcgcccacgacatcaaggcgatcagggaccggcggcgcgaggtcggccgccaggtcgaggctctcctggagggccaccctcttctcacggtcccggcgtcgatgcccgggataggcgtcaggaccgcaagcagcatcctgctcggcatcggcggcgacatcgccaacttcaaatcgtccgcccatctggccgcctacgcgggcatatcgcccgtcaccggccaatccggcaccagcatcaaaggcgaacggccctccaggcggggcaacaaacgcctcaagaacgcgctgtggcagaccgcgttcgtcgcatccaccaaacacccgccctccgtggcctattacaagcgcaaacgcgaacagggcaaacaccacaacgccgccgtcatctgcctcgcgcgtcggcgctgcgacgtgatctacagcatgctcaaaaacggaaccctctaccaggaaccagccctcgtagcctgaaccgggccacacgggaaaggacgccggacgccaccggcagggcgaagcgcgcccacgacagccaaccggaatcccgacacgtcaactccccaaggagttgacaaaaacataggaacacccccctacaaaaaagacggcgcgcatccgccgcatcgcgccaacatccgaaaacagaaaccgatcacgcgcaacccatccgacggcaacggcaacggtaacggcaacggaatcatagcggagccaggaacggaatcagccggcaaagcaaaactacgttctcgcattggcgaaatcttcctcgacggaagtggcggctgatatcgacgcggatgcacgatgcgtgcgcgcgatgcgcaactgcgcttcgtcgagggtctccaaccaacgcagttcggcttcggtgatgaagatgcgatggtcaagcaccagtcgggcggccagatcatcaccgtccgtctgacggcgtgcgcgagtcacatcatgtaggagctgttgcatggacactcgctgccgttgcaccagcgtcgacacatccacgcctggcgtgactaccgcgaacgccagcttcatcaccagctcgtcgcggccgcgctgctcgggcaataccggggtgcgccaccattgcgatacctcagcatggccggcggcggtgagcagccatgccaccggtgaatcggagcgggaatcggaatcgtcgggaacgtcatgttccgaaccgtcgacttgttcgatcaaaccatcacgatgcagtcgctgcaacgtggtggacacctgccccatgttcaacggccatatgcttgatgtggtgcgttcgaaccgacgcttcagttggtaggcgcttgccggtccttgttccaacagcgccatcagtgcttcccgtatcgccatgatgttcctccgtccttcgtatatcatccggtatcgtacggccgatcaatccaaagttcgtctgaccagcttgcgcgacggacgtgcggccagccatgccacgcccaggcccattgcagtaacgccgatcaacaacgcggcctgcaggtcccagcagggcactgtgtcaagccatgcgccgtcatagccgatgtgtctgtgccaagccacatgaaatatccccaaggcgagtcccgtaaccatgccagtcggtgttccggccgccaacataatggcggcctgcgccagcgtgaaccgccgcaggaaaccgggggatgcgcccacggcatgcatcgtggccagatcacggatgatttggatgtgcgccagcagcagcgaaatcaccgtagcggctatcgcgagcagcatcagcaatacgaacggcagcagctccgcaaccatgccggaaggatcgccggtaccccagctgtagcggtagtactgactggtgccattcaccagcggcagcctgtcgtcaatgatcgatcgcagcttgtccagagtcccccagccgggggcgtcggcgaattgcaccatatcgcccacatacctgaatgcggtcaatcccaggctttgggcggtctccttgctcatcgccagagggaagaacccatccacccaaactcccggcttgctcgccgacccagtgaccacatcgggggccgaggaaccgtcgggattgtgcgccttatgtgagtgtgagatttccaaatccacggtgccgtccttgcgcagcgtcgccgcattgccgaccaccacgccgccctggtcgagcatgtccgccgccttgtcggcattggcaaatcccgacaatcgcatcgcatcgccggacatgatcagcacggaaaaatctgcgttgatcatagtcaagcctcgatacgacgggcgataggaacgcgatgctcccacgcagtatggctgggcgttcggattatgcgccgaagccacgtcttgcccgcgatcagggtcggagctcgtaatgcaatccaatggagtcgccagtctggcagcggcattcgggaatcggcgcataagctcattcgcctcagcgacattcaacttgtcgacggtctccggcggcacttccgccagcgcatacacaggctgatgtgcggtgacgggcagatcatcactgatggcattcagcgccgatcgcaccaccgcacgatccacggcattgtcaatcggaacctcaggggacaccaccgcatgcgaatggccatgcaccacttccatggcattcgaccgatcattggcaatcagtgagccggtcatggtaagcgcgtatgaggcgaccgccacgctcacggcgatagcggccgcggcggggacgaatcgacggtgatgctcgccggcatcacgcaatcccatccgtaccgccagaggcagtaaggtgccgtggcgttcgcatgattgcgcgatcagacgaatcaactggatcaggccggcgaacgagaacacgatggctccgatcagcagcaattgcgcgccgattgcctcggccggcagactaccgtagtcggcatcaccgaattccggcatgggcatggcaaggccgcccatgacacaggccacggccgcgccaagcaatgccgcggtggagattgccgtcaccacacgatacaaccgagattcacggcggttgcgctcgccgttgtccgagcggtctttcaacgcgtccaccacattcatgcggctgacgcgatgcgccggcatccatgtggcggccaatccgatcatcactgccgtcaacgcggccaaaggcagcatcgtccacggaatcataccggcgacctcatgcacataggcgcctttcagagccggtgcggcggcatatgacaatccgatgcctgcgatgatgccgatcatgccgcctgatatgccaataaacaagccttggaagctcatcgtgcgtcgaagatccgcgccgtcggcaccgcatgcggcggtcaatcccaataagcgacgagactgatcggccgacacggcgaacgcgggggtgatcaggaatagcgtcagggcaatcccaagaaaagccgttacagtgacggataccatttgcatcaactgctgctgcacgtcgatttgacgcggatatcgctcttccgcattcggataaccatccgtcagcacatggcgcgaaacggcgatcacctgcagcatgttgagccgcttgacctgcgcccacgtcaatggctcgctgccgaccagcagataatgcgcatccaccccattaccgccatccgcctcgaccatgcctttgagccagccggaatacgtccatgcgtcaagcgttgaggtgacatcggcgatgccgctgatgcgccacgcgcgccgcgagttttgcagcaccgcgccaatgcgtccgttcgtactgtacgcaccttgaaatggaggcgcggtgagcgtcaatgtatctccgacattcaggtgcagctgctcagcgagcgatgcgctgataaccgcctgcgtggcatcctgcggcgcggcgccctgcgcaacgggaggcattaacagcggcagcgcatcatgttcggtctcgcgcagcttggctcgtaccgcgccgtcgaggtcggcgccggaggagccggcggagtcagtggtatcggcgccggcggcatcaacctgaatctgatcgcccggctgcaagtcgccgccggcggtggcgattagcgtttccgaatcccaataccgcagcagggcgtcctggtcgggcgtgattgcggcgatggccacacgctgcgcctgacctcccgacatgtcctcaggccgacggagcgccagttcagcgacgcccgtctctcgcaaggcctccaatgcggccttacgcgccttgctgatcggccagccgtccagttccaacgggaacgagacgttctcgatggcgttcaacgacggcagcagattgaaatcctgaaacacgtagccaatcgaccgccgtcgaatcgcggcacgccgggcaacgttcagcgaagcgagatcgcggccctcgaccagcactttgcctgaagacggcgtgtccaatcccccggcaaggttgagcaacgtggacttgcccgaaccggacggtcccattacggccacgaactccccggagcgaagtattagattcgcatgactgagagcgacgaccctgcgcgcgccgtcgccatgcgtacgtgtcgcgtcgacgatcgtcaatatcgcctgttccccggtgtcaaggcaggtaaggctcggcattgcgcggttgattgcggcggccatgagcacctcttctcgatatggttactgagtaatgtaatgctgatgttgctcagtaactacatcaacgtcaaggtgatccaactgtgaatcaggattggttcggagcgtcaacgccacgtcggcggacgacggttcaagacagcgcggcgggctctggagtcccgtatcgcagagccaggcacttctttttctccgggagtcagcaatgagcgagctggacgccatggtcgaagaatctggcagatggggcaaactgtccaagtaccaccccatcaccctgatgttccgcgaccagtccaagccggtcaatccccacatcgaacgctacgaacaacacctcgcggatgtctccctgcccgacatccctttccatgccggcccgctgttcaacggccacgacgattacgagatcccgtccatgaccgaccgcaaacgtctcttcatcgcatttttcacgttggcgaggaacccgccattcacgtatgtgacgttcgcgcaccgcagaagcgagttcgatggggacaagagccgtttcgaagcctagctgaaacgagatctggcggctgctgacgccgctggcgacgaggacgcccgcgttctccacgtgcccgccccaggatcgtttgcgccacacgccgtccacgaacacgtacgggcactcggattccaacgggcgtttccgccacccgttgatctccttgtagatcttcttgagtttgtcgctcaatgtccgggatggcatccgctcgccccacagcagccggctgatgtcgtccaccccgcgtgtgctcacgcccgcgaggcacatctccatcagcgcctcctcgacgctggattcgcgcctccggcagcgctcgatcaccgccgacccgaacagggcgtcatcgaaccgtatgatttcatcggacatggcttccagccttctttccaatcgcggttttcatgtgtaagcgactgaaaatcgcaccaaagctgggccatgtccttttcatcggaacccacaaccgaatctgcgcaagaagacgggcgttatcttagatttttccgggtacatatataaatcactctaaagaaggtttttagcaagtcttacatgcgttctttcgcttgaaaataagcgatatttttgagaacgaaacacacgcagggaaacgccacgccgttaccccatatcttgtattctgccgaatcagtgtgaggattttaagccatttgattatctgatttttacttttcggcttagtagctttttgttaccagaacagtccataattaaattggatacaattaagtgtaaacggtgccaccaaaattgaagaggattatcatgatagcttgtaatatgttataattgttccgggttttactatcgtcagtggttgatagcttattatctggagcattgacgatgagagtcgttcttcagtcatgaatcgtcgttacacgatcgacagcggacaactgttagctaattattgttaattgctacaccaagccattttctcacaattccccctggatattcacctcttggaagatcgtatggcgtaggaccgttgcaaattttaaatcctgcacgttctagtaaatcacatacatcagtaaacgataaatatacttttgacgaggattgtaagttgtatccaactatcaaactccccatttcggttatcgcatagttaacccatttaggccataaatctgttccaatagcaggtagctggaacaaaagaattccgctaggcctaagccgccgtctaagtattttaaatcgctgaaggctctcttcaaaactaccatatactagggctctactacatatcacataatcaaattctggtatataagagaaagcttggtcatagctaagagcctcaaatcgatcagcatattgtggcaaatacttttgggctctttgtatattgaaattagatacgtcgcatgcatataagttccatccctctgagaggagtggaaacgcattccttccgtttccgcatcctacgtagagtcctttgtccaaaggagaagaaaacagtcttacataatcacagattggaagaggcgaattgtgcgaattatgattttctaccaatgaggtatccacgattgttatgcttttattcggattttctaggtagcgcagcagcgagcgtaatggcaatacccatagcagcaggaagcacacaattagcggcagtaatcgtgctagcaaagagtgatggccctacaatattctggaattgtccaccaagattaatagcgcttaagtcagtagtcagataatcttttctgctcagcaatgccatatacatggtaatacctgcggtgctgagcagttcagcgataatctgcagcatggcaagcaacataaccagtgctatgaagggaaaatcatgtgacaggaaaggtatgcaggctacagcaataaatgcaattgcctgcagtagtccactgcagcgccaagccagcgcataattacgtgctttcgtggcccaatggttgacaggaccttgggctagtgcaataactaccgtattggcaacgaatatggctggcgcctgccatgtgtcggtaggcgcgtaatgaataatcagtaatggtagatacacattgagcagtgtacgatgaaacgagaacaggaaattttcgataatcagccgagaacgagaccttgaagttagtgcagtgcgaaaaaccgtccacgaagttagcggtgaacgtttcacctttgcagcggttacattgcaacctttgagcgctctgcgatatagcacaactacgacaacgaacgagagtgaatttgctgccactatgatcacattcccgtactggataagcagcatcattgtgcttagtgccgcgccaagcgcgtaaccgacattcgtcggtaatgccatgcgacccaagagtattgtggcttgctctcggctcagcggtgcgataatcagtcctcgtgtaagcgatgctgctgagcggtcgataacaccgaacagcgtcatatagacaagaaatgcagcatcaccagagataataagccatccaagcattcctaccgctcgtagcaaatacgagtaagtgaaaacgcgcaaccctccgatacggtcggcgagatacgcagcaggcatcgaagcaatcatgccagaaacagctgaaaaggtcagtccaagaccaataatgcctgcagaaacatgattatatgaagaaaaaattaccgccgcagcgctgacaaacgagcccgtaccaaacgcatcaataccagaagccaataaagcagcacgttgcagccgttgttcaatagaattcatttacctgctccacaagaaggacaatgtggatctttcggaataggaaggcgataataatcgttttgaaaattggaacaggacatcaaatatccgcgtgctaattctccctttcctaggagtattttgagaacttcatttgctcccatcactcccgcaatacctgttgctggcccccagacgggaacaggtcctttgcgacttgcaggcaaatctggaaaggcgcaatttaagcacggatcctctttattaatcattgtgaacacatacccataagcatattgtgctgaaacatgcaccattggacattgattatccacagcaaattggttaaccattagtctttgatccggaccatctccaccctctaaaagcacgtcaaaatttccaagcatgctatcaatattttcattggtaacacgctctgtggagaattcaatcgtaatatcaggattcagcattctgagtttctctgcagcaacctctgccttatacctgccgatatcgttagtggtatataaaatctgtctgttaagattacttaattcgacacggtcaaaatcaattatttttcctatcttcacctagctggttattattccccgcaatggtatcccgtcaattgttacttgtattgttacttgtatttcacatttgttaaatgatagtgcccgcttctttgcgcagattgactgtttgatcctatggttcgcggggaaccccggcaggaggcaggcggcggtctcgccgacgccctcgcgcaggcggttcgcggccgccttgagcttgcgttcctccatttcgcccgcgaccgtccctgccttggccatggcggattcgcggttttcatgtgtaagcgactgaaaatcgtaccaaagccgggccatgtccttttcatcggaacccacaaccgaatctgcgcaagaagacgggcgttatcctggctgactacctgctgacgcatctcgaccggtttcagtcgtacgacaccatcaagatccactatgacaacggacagcaggtcgtcaccaacgcattgtaggcctccgtcagctacacgctcaccaaggaggcagtcgcctatcgcaaggccgaccccaaggattatcatctcgagcagaccgccgacctcatgtgcaccatcgaactgaccgcactgaaattcaaagccggggaaagcgccaaaaccgaccacaagatgcggcgaccggcgcacgttcagacagaattatctgaagatattgcgacgcaaactcgccgcatgaccaaactgccaccaaatgtacttacaggagatcccccgttgcggtatgacgatgggatatgggataatccacaaggtgcttttgcttgggaccgaggcgccgcgatgacacggaaaatccagggacgggcggcatcaaacgggtcgttcggaaccccccgaaaccggacgcatcgttccacagtgtgtcatcacggaatccaagcccggcaaaacgttgaaattgcaacgaaaagacaggataagacacttatatggctgaatttgtgtttcagatgatcaaggcccgtaaatcctacggcgaccgagtgatcctcgatgacgtgaccctgagcttcctgcccggcgcgaagatcggcgtcgtgggcccgaacggcatgggcaagtccaccctgctgaagatcatggccggactggagaccgtgagcaacggcgaagccagtctgaccccgggcttcaccgtcggcatcctgcaacaggaaccgccgctggatgacaccaagaccgtgggcgagaacatcaagatggcgttcggcccgattgccgagaaggtcgcccgattcaacgagatcggcgaagaaatggccaacccggacgccgacttcgacgcgctgatggaagaaatgggcaagctgcagaccgagatcgacgccgccgacggttgggacctcgactcccagcttgagcaggcgatggacgccctgcagtgccccgatccggacaccccggtcaacgtgtgctccggtggcgagcgccgccgtgtggccctgtgcaagctgctgcttgaggccccggacctgctgctgctcgacgagcccaccaaccacctggacgccgagtccatcctgtggctggaacagttcctgcaccagtacaagggcgccgtcatcgccgtcacccacgatcgttacttcatggacaacgtggccgaatggatctgcgaggtcgaccgcggccacctgtacccgtacaagggcaactactccacgtacctcgagaccaaggccaagcgtcttgagattcagggcgccaaggatgccaagctcgccaagcgactgaagaacgagctcgactgggtgcgctcctcccccaaggcccgtcaggccaagaacaaggcccgtctggaacgttacgaccagatggagaacgaggcacgcaacaacaagaagctcgacttctccgagattcagattccggccggcccgcgcctcggttccaccgtactggaagccaaccacatccacaaggctttcggcgagcgcgtactcatcgacgacctgtccttcacgctgccgcgcaacggcatcgtcggcgtgatcggcccgaacggcgtgggcaagtccacgctgttcaagaccatcgtgggcctggaaccgctgaccagcggcgagctgaagatcggcgacaccgtcaaaatcagctacgtggaccagaaccgcgaaggcctggacccgaacaagaacctgtgggaagccgtgtccggcggcctcgacttcatcgaggtggccggcgtggaagtgccgacccgcgcctacgtggccagcttcggcttcaagggcgccgaccagcagaagctgaccggcgtactgtccggtggtgaacgcaaccgtctgaacctggccctgaccctgaagcagggcggcaacctgctgctgctcgacgagcccaccaacgatctggacgtcgagaccctggaatccctcgaaaacgcgctgctcgagttcccgggctgcgctgtggtgatctcccacgaccgttggttcctcgaccgcgtcgccacgcatatcctcgcgtgggaaggcgacgacgacaacccggccaagtggtactggttcgaaggcaacttccaggcctaccaggagaacaaggtggcccgactcggtgaggatgcggcccgcccgcaccgcctgcacaagaagcttgtgcgcggctgagatacgccggcattagtgccacaacgcgctttatacgtcgaaagccgtccctcaggggcggctttcccataattgccccatgactgccccgccccgcatcccataaaatcccacagtcacctacggcaacgcaccggcaacacaccggcaacacaccggcagcgcagcagcaacgtagcggcaacgcaccgcataaccaaccgtttaccttccaaacagtctcgttacatttcactcccggaactcttaccccccaccggatagactgccaaccataggttggaatacgataaccgaatatcgaacacagcagaacaggaatcgaggaacgccatggctcaggcaaccaccgtaactccattggaccatctggtgaaggtgctggagttgggcaagccttccgcttaccgcaatcacacatacatcaatggcgagagtatgtacttccccaccggccgcgtctacggcggccaggtcatcgcccagtcggtgatcgccgcgtccaaaaccgtgggcccttcacgcctgccgcattcggtgcatggctatttcattgccgccggcgatattcgtcaagacctgctgtttgacgtcgagaaccttcgcgacggccgctcgttctccgctcgtcgggtcaacgtcacccaagccgaggggtcgattctcacggccatcgcctccttccaggagaccggtcaggagggtgtggaatttgccgatccgatgccggaaaacctgcccgatcccgaaacgttgacttccgccaaggaactcatgcagccgttcgccgaaaagtcgccgttcgccaatttctatgtcgagaaatcgccattcgatatccgccacgtgacgccgaccgtgatgctgcgcgcagacaaggattccgccgagcatgattccggcaagcagatggtgtggatgaaggccgatggccacgtcgatgtgccgcaggtcatgcatcgtgcgatgctggcactcggctgcgatcaggtgatgatggagccggtgctgcgccgcgccggactgtcgatttccacaccgggcatttcctatgcgtccatcgaccattcgatgtggtggtatcaggatatcgatatcaacgaatggcatttatatgtgcaggatacgcctatcgccgcgcacggacgcggactcggcatcgccaaagtgtatgcgcagaatggcgacttggtggcggccatcgctcaggaagctatggttcgcgtgccgcaggagtagtgggaatcggcttggccgatggtgtggttttttcttctctcccccagtcggctacgcctacggccccctcgccagagggggcttatcacggattatcgcttgtaggcctgggctatgtcgctacggcgcttggcttccttgattttcaggttttcggggccttcgttcggcggtagctggcacaaccattcgccgataatgccgatgatcatgtcggcgatgcacaccacggccgcgattgcgcactcggtgacggcgtgtgcatagaaatccgcctcgatatggctcaggctcatcacaatctgaccgccataccagccggcgagcgttgcgcccgccaatcccagtgcctttgccagcaccagcgtatacaccgcgatagtgggattgatgaagctatgcggacgcttcttggggtcggtattcgcgtatttatgcacttgcagggccaagatcagcacgataacgcccagcacggccagcaatccggtcacaatccaaggcgcaccaatcagcgacagtcccgagctttcgccgtaggaggccagaccgatacccgccaacaggcccagcacggcaccgatcacatactgccaccatggtgttcgccgtgttttcatgtccggtctccttatcgttgcgttgctgtttgctgtttgcgaacggccctcgcgcctgggctgttcatcttgatttggttttcgtcactgccgtgcccggctgttcgaggccggagactgatccgtcaccgtctggttcctagcctaccgttcgtaactggttctgccatcagctcaactgttcgacagtatccagttgtccgatagcaatccgacctgtccggcatccggtgccatggccaaaaggaaggccaccgggtcgccgcccagagaagcattcgggtccatatccagccaaggtgccaataccgacgcatggttacgggccgacggccaaggaatgctgcagttgggctcgtcggaagtcacgccttccatgtcgacaaggtcaaggtcgactgccagatcatgaacactttcgatgctgcccaatacggcaatcaggtcggcgggcggcaacttggtttcgatttggatgaccgcgctcatcgcgtccgggccgtcgaaatggctgacatggtagagcggcgagatgccctgtacctgattgccaggaacactgtcgatggaaacgatggtttcgcggaacagccgttcgacatcctgcgaggtggaatccagcgaaataatcgccttgcgtgagacgggtgccgactccgacgctgatttttgcttgactgcatgcccgccgagcatccagtcttcgctctcgagctgcacggcgttacggtccggtgcggcggccagcaaatcggctacaggcccctcatgggctccggcaagtttggcgttcggattcagcgccgcccagggagccagcacaaacgcgcgctgccaagcacgcggatggggcaatgccagatccggatccgcgctggtgatgccatcaaagtcgataatgtccaagtccaacggcctggaatcccaatgattctcacgaattcgcccatggttcgcctcgatgctttgcaacgcggcgagcaattcgtggctgcccattgtggtttcaagctccaccacggcgttcaggaaatccggcgtaccgtcagccatgccccacgcggccgtgcggtaaagcggcgaaataccggtcacctgtgtgccgagcagcgcgtcaatctcccgaacggcggctcgcaaggtggattccacctcgcccacattgccgcccaaggccaccaccgcgttatggatggcatgctcttcagcagtgcgtccattatcggtggcacgcacgcgcgagatggagaccgatacatctgcaaaagccacgacgatgggcgcatgaggcttgtgcacggtgacgtcgatggaggcgacggccggcgcatcggcaaggatcttatccgcgatacgttgggccagacgctcgatcaggtccacatgagggccttcgatgacagccgcgatatccttggccacacggccgtaatcgatggtgtcgttgagatcgtcggattgaccggcggcggccagatcaaggtgcagggtgacgtccacgacgaaggtttgtggccgttcgtgttcaaaggcgagcacaccgtgggtgccgttggcatgtacgccggtaagagtgatggtgtccattggtaaggctttctgctcaaatgctcccctcagtcgccttcggtgccagctcccctcgtccgaggggagccaagacctagaagcaaccaagaaacggagccaggggaatcatgcgtattcgcgccaggtgttgccggcgatgacggcggctcggcttttggccacgtcgtgtacgcgcacggcccatgcgccgtgttcggcggacagggcggacaaggatgcggtcacgtcatcgcgctgggccatgatcggcccatcagcaccggcagcgcccgcctcggtaagcatcgccgaaatgaagcgtttgcgggactggccgatcagcaccggatatccggtggctcggaaggtctcgagtccggtcagcagcggcaggttgtgctcgatgccgggcttggagaagcccaggcccgggtcgatgataatgcgctcaggcttcacgccggcggccagcacaccgtcgacttggcgcatgagttcgtcgtgtacatcggtcaatacaccgtgctcgtagacggaggtgtcttgatcggggttcgcgcccttggaaccggcgagccagccgcgccaatgctgcacgatgtacaggcagtcgtggtcggcgaccacgtgcggcagttcggcgtccagcgtgccaccggaaacgtcgttgatgatctgggcgccctcgctcagcgcagcggcggccacggatgcgcgcgtggtgtcgatggacaatatggcaccggccggaatcaatgtcttgacggcaccggtgatgcggaccaattcgtcggcctcggacacgcgcttggcgccggggcgcgtggattcggcgccgatgtcgatgatgtccgcgccggcggccatcatgtcgcgcccgtgctgtgccgccgtggccgggtccaaccacaggccgccgtccgagaacgaatcctcggtgatgttgagcacacccatcaccatggtgtgcgtagtgtcatgcaacgcctgcaaatcagtcattatgtttccccttctatgtaggtcccaagtgagctccctatgatgagggagcttagtagacactatttatccaaaatgaggctcatggcttcggctcgggtggcggggttgcgtagcagaccgcgcaccgcagaggtcaccgtgcgggcggaagacttcttgatgccgcgcatagacatgcacaggtgctcgcattcggtcaccacaatcacaccacgtgcgcccgcatactcgaccagcgcgtcggcgatctgctgggtcaaacgctcctgcacctgcggccggcgagcatacacctcaaccagtcgggcgagcttgctcagccccatcaccccatccttggcgggaatgtagcccacatgggccacgccatggaaaggcagcagatgatgctcgcacaccgaatacagttcgatgtccttgaccagcaccagctcgtcggtatccacgtcgaagtgcttctccagcacatcggccggcgaggcctgcagaccggtgaacagctcgcggcacgcgcgggcgatacggtcaggtgtttccaccagtccctcgcgctcgggatcctcgccaatcgacttcaggaacaggcgtacggcctcgcgcacgccttcctcgtcgtatgtgtgtttctcccgatggcaagactctatatattcgttcatctcatctctcccttgtcattgtccacaacgacgtcggcccggcctgcgtacgtgagaaaccacatgaacaggtcgggccgaatcgtcatcgtgtctactcttccggcttcatgccgaccgagcgcttgaggctttcgggaatctccaccggcggcttgtccgagtcggggcgacggtcgttggacaaccacaccggacgaaccggagccttcttgatcggcgcgaagatcgccgcaagttccttctcgttcagggtctccttgaccaacagctggcggaccagctcgtcaaggatctcgcggttgtcgttgatgatggtccacgcctcggtgtgcgcggtctccaccagcttgagcacctcgtcatcaatcacttcggcggtgcgatcggagtacttgcgcggctgcagaccgtccatcacagtggtctggtcatcgtcggaaccccacttgatggcaccgagcttgtcggagaagccgtattcgatcaccatcgtacgggcgatgttcgtagccttctcgatatcgttcgaggcaccggtggtcgggtcgtggaagacgatttcctcggcggtgcgaccgcccatcgcgtaggccatctggtcgagcagctggttgcgcgactgcgagtagcggtcggaggtcggcatgacggcggtgtagccgagggcgcggcctcgcggcagaatcgtcaccttggtcaccgggtcggtgttgttcagggcggcggctaccagcgcatggccaccctcgtggtatgcggtgttgcgcagctcttccagagccatgcccttggacttgcgcttcggtccggcctgaacgcggtcgatggcctcgtcgatggcgcggttgtcgatcaactgggcaccggcacgggcgcacagcaacgcggcttcgttgagcacgttggccagatcggcaccggtgaagcccggcgtgcgcacggcgaccatgtgcaggtcgacgtccggtacgaacggcttgcccttggcatgcaccctcagaattgcctcacggccttccagatcaggggcggccacgcccacctgacggtcgaatcgacccggacgcagcagagcggggtcaagcacgtcagggcggttggtggcggcgatgatgatgaggttggtgtcgttgtcgaaaccatccatctcgacgagcagctggttcagcgtctgctcgcgctcgtcgtggccaccgcccatgccggagccacgcttgcggcccacagcatcgatttcatcgatgaagatgatggcgggggcgttcttcttggcctcatcgaacaggtcacgcacacgggaggcaccgagacccacgaacatttcgacgaagtcggagccggccatcgagtagaacggcacgccggcctcgcctgcgatggctcgggccagcaacgtcttaccggtgccgggaggaccgtacagcagcacgccacgcggaatacgagcgcccagcgccttgtacttggacggatccttgaggaagtccttgatctcctcgacttcggccacggcctcgtcttcgccggccacatcggcgaacttggtggtgggggtctggccgtcgagcagcttgccgctgttcttcctgccgcccatgccgagcatgccgccggcaccgcccatgcgactcatcaggaaccagaacagggctaagacgatgacgaacggcagaatcgaggtgacgaggtagctcagcatgctggtctgctcgatgttcgaagtccagcccttctcaaggttgccgttctccacggccttggccacttgggcgccctgcgcgaaggtgtagtagaactgcacgttcttgccgtagttggtcaccttgccggtgtcggcattcttcttggtgtagtcgttcttcagcttaaggcggacgacctgcttgttgtccgtaatctcggcgtacgtggccttgccctgattgatcagcgcgaaaccatctttggtgtcgatggttttggtgccaccgccggcgaacatctggaacatcagcacgatcatgaccacgagcacggcaccccatagccaaggggactgccatatcgggcggttctcgttgttgttgcctttgccattggtcccgttattgccacggttgaacgggttggtgaacgggttgccgttgttacggttgttgttcgggttcggattattgccgttacccggcccttgcgggaagctcatgcttgcactccttggtagacggacggcttgaggaccgcgatcgaatcgagattgcggtagcgttcgtcaaagtcgaggccgaagccgacgacgaactcgtccggaatctcatagccggcgtacttcacatcaacgtccacctctcggcgggagggcttgctcagcaaagcgaagacctccacggaagcggcaccacgacgtttcagttctgcgaccagccacgcgagcgtgtgtcctgaatcaacaatatcctccacaatcaagatgtgccgtccgcgaacatcggcggacaaatcctgcctgactgtgacctcaccgctcgacactgtgcccgagccatagctcgacaggctcatgaagtcgatctgtacaggaatgctcatggcctgggtgaatgcgaccagcgtattcacggcccctttcagcaccgcaacgagcagcggattcttatcgcggtaatcctcgctcgcgagagcggccatctcgtggatcttggcatcgatctgttctttgctgaccagctcgtggtcaatatcttcctcaacgtcagcgattcgcatgcgcaccatcttggcacacgcgaatgacgtgtttcttgcgattggctgaataacctctgggaagtgagacgccgccttggccatgccaatcgacgaccagccggtcgatggcggcaatctgggcggcactggcgttcacaccggcttggctcagcgcatgagcgatgacccgcaaccgaatcgcctctggctcacgtgcaatacgtctgacgctgatcatcaggccgacaccatggctcgaatcgttggtatcgcctgccgcacaggctcgtggcgtatcggtcgataccgctgccgacgatgccggccaatcaactgtcgtaaccgcctcccccatcacctcgtcggatcgctgatccagatactccttgtccattctggccaaccgtgcgctttcagcgaaatggcgggcgacattgaatccagcgaatcgctcgatggccggcagcaggtcatgacgcacccgcgagcgcaacggatagtcgttcggcaactcgccgtctaccgcatcgccattggtggggtcatcccaatattccacacctaagtcttcacaaatgccggtggtttcggctcgagtaagggtaagcagcggccgcgcaaaagtcacgccactgcgtgtgaagacctgcggcatgccggccaacgcatccacgccacggctgcgcagcagtccgatcaatacggtttccgcctgatcgtccatagtgtgggccaacagcacggcaatggcacctgattcacgcgccgcggcgcacagctcgttgtaccgggcctgccgcgcggccgcttcgaggccctcaccgcgtgcctgcacggttgcgttgcgcacgatgaccgggcccagtcccaacgcacggcaacgattcgcagcctcgccggcgacctgttcggaaccctcctgcaagccgtgatccacaatcacggcaccgcaacgcacgcccatggacgtgcatacgatatggctcaccgcggccagtgccatcgaatcgcgcccgcctgaacaggccacgagcacgagcggcgcatcggcggcaacggcatggtccccatgctgcgcgaattcgggagcctgcacatcgcatagttccacagcgctcagcgttgcgtggaccgcgcctacggccttgcgcaatcgtgcggaatatgccatgtactcaccaccctttttctggttatgtgtactcgtgcgtttatggacgtttacggcctttgtagcctttgatggcacttgatgggtcttttacagccccgcgagcttggtgatgaacgagtcgatggcgctacgcgcggcggcataatcctcaggattgttgaccaccacggcaaacgacaacgctcccccattggtgcgggacacattgccggccatcgacgtaaccgtgccgaggctgccggttttgacgcgcagcagaccagccacggcatcatccgtataccgatcctgcgccgtgcccaccaatcccgcgatggatagaccttccgcgccggccgcgccgctcttggtggtcagattacgttgttggacggccgccagcgtgcgtacggtgagccgggagccgggagacaggccggagcaatcggccatggtcagaccggatgtatcgagaccgagatcgttcagagtggatttgaccgcctccgtgccgccttcaggactgtttgtcgctgatttcgccaaagcggtgagtctgccgaactcctcggccagcgtattgtccgaatgccgtaatgtgtatgccatgatttcggacagtgttgccgaactcaccgaagccaaaggcgtttcgccggatggagcggtgtttgccgtcacgtctccggtaacggccacaccgttcgattggagcagttcggcgaatttcgtggccacgtcgctggcggtgtgctgggacagttccgggtatccggccgaatcatcggggtcggccggcgcaggcgtatcggcggtgtgttggcggcctccatcaatcgccattgatgagaccggcgtgaagtagacggtgtagtcgcttaagaccgcgccaccttccgacagacctgcgggaatgcgtgagtcgccgaatagggtgtcgtcgtactcgagattgacggaagtgatgcctcgctgggcgagcgcggccacggtggccttggccaaggtgttcagaccggcacgtccgttggtatggttggcgtcggaatcgcctgcagacagcagcatgtcgccattgcctttgagggtcaacgtattggtgccgtcatcggattgggtcaggaacacttgggtatccaaggtggatgccatgttcagggtggatgaggcggcgagcgcggtcagcgttttcagtgtggatgcaggctcgcgtggagtgttcgactcatgttcgtcagcgacggtgccttgggcgtcttcaatgatcaccgacgtatcgtttcccacgccttgcgcggacagcaattcgttgaccagcgcagaagcggccgtggaatcaatggccttgttcgcgttcagggcaccggcgatggtgccgcctgatttggcggtggccggattggcgaaaacaggtgcggtgacaggttttaacgtcaacaatccgggggccacgtcggtgatgtcggcggtgcagtaccccgcgaacagggcgatggtggtcagtgcggaaatgatgacggtcagtgttcggcgatgcgattgttggggccgccgttgcgcttcacgtcgctgacggcgtgataccgctgtagataccatcgtgctccttatgccaaggcaatcatttctgcaatgaggcgaacgagtcgagtgttgccacaatcgagagcattcgcgcatccatcagcttatcgcccagccatgtcccgagtgccagaatgccgatgccattggccagcgcgaccggaataatcgccagccacatgccgccttcggctcctgtcagcagcatgaccagcgccacgatgccagtgggcagcatgagcagcaggctgccaagcatgtagacgaacgggaagaagccttgggccatggcgcggccttgaggcgcggagaacggcttgtccattgaggcgaccgggtacatcagtacacaggaggtgacttcggccacgcccagtccgctcaaggcgatgcccatgcccgtggcgaggaagatcaggccggtagcgaggtcatcgggctgcgcccagcgtccggtcagtgcgccgaccagcacgatgccggcgagatagagcagcaccatgtagacgaccatgatgccgacgtagacgcgtacgcggccgattctgtcggtccggccacgcacgccggcgatgacttccatggtgaagccgcggccgtcatatgcgagcccgttgctttccacgacggacatgaaccagccgcaccagatcagcgactgccagacgaccgcgctgatgccgtgtgcctggaaggcgaagatgatcaggaacaggaccggcatggcgaaggtcatggcttggcgggggtctcgtttgagataggtgatcaggcgtgcggaaaccgcgccggatgccgaatcgggcatccatgcgaatgcgccgatgcctttggcggtctcggacggactgtttgcgccgatggtgagccgttcatgtctcagacaccaggtgcagacggcgaagcagacaatccatgtgacggcaaggatggcgatgcgggcgagcagcaccgcccaggctccggtaagcgcgtcgaacggtagttggaaggccgcgccgaacggcgtccatgcgacgatggtggtcgccgcgccccaggtttcggtgttgaggctgaaggccacgccggagttgaccagaatgttcggcaactgacagatgataacgaacgtcagcacgatgaagatatagaacgcgcctttgccgcgtttgctggtcaccagcgtggtgaatagggcgatgagcagtttggagatgctcatcatggtgatgacggccagcactgcggcgaggagggaactgatgattacggctggtcccatatgccgataggccagtgtccagagcatcagtgaggccacgccggtaagggcggggatgccggacaggccggaaagcagcaagccgaattgcaggttgcggtcggcgatgccgtagagcgcgaatttgcgtgggttcatggtggagccttcgccaagcatcatgagctggatgaagccgatgaagatggtcatggtcgcgccgaccagcacgacgactatgttgacgatgcctccggaaccaaggatgttcagcggaaagccatccgcgttcacggtgaagggcggcagtatgccgatgaaccatgcgagcacgccggtgccgatgatggtgccggccgcgagtacggcggaaaagacataggcgacggtctgccacgccgattttcgcagggtggcgagcgtgagcgtccagcgcaggcggaccagggtgatggcgctgctgatcatcggcgggcctcatcggtgggtgtggcgggcgtggcggttgtaagcggaatgggctggaccggctggaccgaagttggtgcttgggcttgggcttgcccgccgtcgagccatgcgagatgggcggcttcgtggcggccgccgaccagttgcaggaagcggtcttcgagttcttcgccggcggcgacctcgtccaccgtgccggccgcgcacaccagaccgttgttgattacggccacatgcgtgcacatcttttcgaccaatgccatcacgtgcgaagagataatcaccgtgccgccggtcttcgcgtattcgatgaggatgtctttgaggttggcgctggacaccgggtccacggattcaaacggctcgtccaggaccagaatgcgcgggctatgaatcatcgcggaggccaggcagatcttcttggtcatgccggccgaataatcggtgaccatcgtgttggcggccccggccaagtcgaaagcattgagcaggtcctgggcgcgacgcgtggtctcatcgcggctcatgccgcgcagcatgccggagtagacgagcaattgcaaaccggtcagtcggtcgaagatctggtcgggctggggcatgacgccgatcatgcgcttggccgtgttcacgtcgctccacacgtcatggcccaaaatcatggcggtgccggcgtccggtaccaatagaccggtcaccatattgagcgtggtggttttgccggcgccgttggggcctacaagtccatagaacgagccgaccggaatatcgagcgcgagtccgttgacggcgatcttccggtcgaagtgcttgaacaggccacgaatggacaccgccgcattcggattcggcggccatgcttgtggctgcggttgcgacggctgtgcaggcgcgggggcggcggctggcatcatcggcggctgaaatccgacattcctttgagtattgtctaagctcatacatccactctaccccaccagtcaaccctcagcgaagcaaacccccgggttgctgttggattgccccgctgagcggctccggactagcggactcggtcaacccttatgcgcgatgggcttccactgggctttggcgaagatggcctggaaggagatcggcacgtagctgagtatgtaaatcgggaagctgagcacataggcgagcagctccttgttcgtggcaccgatctggtcgcgctcgacaatgatggtcaatgcagccaatgccatcaggcccaacaccgatatgatgatgccgctggaccaaccggccagcgattgcagctggctcggccaactcacgaagccacacgcggcgaacagcaagcccatcaccgcgcgaatcgcacccaacacggtaaacggacacagcatcaatgtgaagtcgatgcaggagaaatcacgttcgcgaaccgcgcgtttcagcaatgccgagccataataacggaatacctgcaggaatcccttgctccaacgcaaacgctgacgccaactttgcgagaaggtaaccggctgctcgtcgtagaggatcgcagtaccgcaatagccgatgcggtcgccatgcagaatcgaatccatagtgaattcaagatcttcagtgagcagatggaacttccatcccttgttccgcttcatcacctcgcgggagaacatgaatcccgtaccgcccacatggcaagaggaaccgagaatcatacgcgagttagacaggaatcgcgattcacggatgaaccacagcgcagaaccagaagacacccagttatccgccagattcaccgaattacggtagctggtcagaatcttgaatccggagcagaacgccttgttcatttcctcgaagtagtgcttgtccagcttgttatcggcatcgaacacgaagtaggcctcataatcatcggccacaccgatgtcgagcatatgccccaacagatacgtcagcgcatatcccttgccaaccagctcaagattgtggcgttccaccacatggcagcccaaagaccgcaccacgtcggcggtgttgtcggtgcagttgtcggccaccagccagatgtcgatgaggttggacgggtaggtctgatcgcgaatcgacccaataagattgccgatcactttttcttcgttgcgcgcggagatcagcacggcataccggttggtcatcggggcgtcggggaagcgcacgggcttggcgaacagggacatcacgatgcacagtccctgatatatcatgccggcaccgccgacgatcatcagaagaatatcgagtacggaaagcagagtcatcagcgccaccctgccctaggattgctggaggcagattgatcagactgcttggtttgcttgcgttgctcgggctgctcagactgctgcgtatccgcggcaccacgctgcggaatcgccgccgtatccggctcatcaaagcttgcatccgcaccgactgtattatcggcgttatcggtatcatcggcatccgactccggctcagtgccgcgtaatcccttgcgagcgctggaggatagcacgttcttcggaatcgccacggtggcggaatcgtccaaatcggattctttcgtctcgtgcgacggaatcgcataaatctgttcctgcagcaaacgcagttcctcattcatcggcacgcggttggtggatcccctggccgcacgcggcatgtgctcgccgattggctgcaatacgtgctcgtcgaacgcctcggacgcctcgacgatcttggacttcttctccggagtcggatcgttcatcagcggtgagtcaatcagctcatagcgcttggtgtacgcacggaagatggcctgcagcgatgcggtgaccggcagcgccaggaacgcgccgaatgcgccgaacagcgagccgaacgccagcaccgagaggaaggcgacggccgcgttgatatccatcgtgcgctgcgaaatcctcggcgagagaatcaggttctcgatctgctggtagacgatgatgaacaccagcaccgccacggcgtacgtccacccgcggttgccccaagcgaacagcaccggcagcgcaccgccgatataggtgccgaccgtggggatgaactgggataccacgccgcagaacagggccaacggcagccagtagggcacatgcaggatctccaagaagatggcggtgcaggtggcgttgatcagcgccagaatcgaacgggagaacaggaaggacgaaatctggccttgggccacggtccacaccagcaggaatcgacgctgcgtgttgggggccagccactggcagaaggagcggcgcagctttgggccggcggcggagatgtaatatgtggtcattaccacggtcatgaggttcagcaggaaggagaacaggccacccaccgtactcatggcggtgccggcgaaatcggtgacccacgaggtctggatattgttgaagatttccatgccaagattgctgatttccggcatcttgaacgtggcgtgctggtccacgaactcacgaatctgcccatacattgccggcaaaccgcggaccatggcaatcatctgctgtacaaacatattgccgaacagcgtgagcagcacacccacgaccacggccacgcccaccagactgacggcggaagccacgccacgcttccagccatgagccaccagcgccgccaccagcggttcgacggccagcgccaggaacagcgagatgatgatgtcgaacaccagataggagatgtcgccccacgagcgccagcagaacatgaatacgatgacggcgagggccacatacagcagcgcgcggccgaaccattccggtggcctgcgggaatctcccttggcggggaacaaagtaccaaagtcgatacgattctcgtcgtccgggtccgccccggcttctgcggcaccgcttctcgacgtgtcggtgctgtttatgtttcgcgcgcgttcgctcatggctccccattgtagcgaggggtttgaagctcggatacgccggcggcgtacacccgcttttctattgttgatgttatgctcaacgtttcgatcatcatcccagcgtggaacgaagccgaacgcatccgcgactgtctgctgaacgccactcgccagaccatcatgccgcatgaggtgctggtggtggacaatcgttctacggacaacacctgcgcgattgtcgaacagttcatcgccgaacatcccgaggccccggtcaaactgttgcaccagaacgatgaacaggggctgattcccacccgcaactttggcctgaacgccgcgaccggcgatgtgctgggccgttttgacgccgactgtatgatccggcctgactgggtggaggtggtctccggcatcttcaccgaagacccggccgcgatgggtgccactggtccggtgatgtattacgacatgccctcacgtcatttcgggttgaaaggcgacaattccttacgcaagcgaatctaccgtgccgatggcggccagccgctgctgttcggctcgaatatggccttgcgcgcttcggcctggcatcagatcgcgaatgaggtctgccgagataaggccgatgtgatgcacgaggatatcgatatttccctgcatctgatgggcaagaatctgaaaaccgtgtactcgccgcgcatgatcgccgcgatgagcgcgcgacggatggacacgtcgctgagttcattcctgaactacatgcgacgttttaagaatacgtttgatgcgcatccgcaacatacgcgcacgcataagccggaggtgttgttcaccgccatgtatccggcgatgcatatgttctacccggtgtggcagaaagtgctgaattccgcggatatcaatcctgctgaagccgcgtggatcaacgagcagatgaaactggcggaggcgcaaggcaagcagctgtacgacgagacccccaccgacgaagtctacgacgaaaagcacgaaaagtagctggatatacgagccccctctgcttatgcaagctccctctgatgagggagctgtcgaacgaagtgagactgagggagagactgcgacgcagccgctaaaacatcgaatcggccgcaggccgatacctattattcagcggctacgccgcaacttctctccctcagtcagctacgctgacagctccctcatcagagggagctaatgtttaccgtcatcgactgatcacatcagcgacttgtaaatcgcgagaatgtcctcttcggtggcctgacgcgggttgccgggggtgcacacgtcgttgaaggcgtcgtgggccagcggttccagatcagcctcggtggcgccgacctcgctgatcgtggtcgggttcttcaaatccacggtcagcttgtggacggcctgcacggcctcttcgcgcaccttctccaggtcgccggtgtaggcgtcctcgacgccgaacgcgtcggcgatgtcgcggtacttctcgcccgtgtagtccttgttgtattccatgaccggggccagcagaataccgttggccacaccgtgggccacgcccagacggccgcccagcgggtgagccatgccgtgcaccaggccgaggcccacgttggagtaggccataccggtgatgtaggaggcgtacgccatctgctcgccagccggaatgtcgccgtcggcggacttggctaggttcttggcaatcatgcgaatagtctgcatggacaggcagtcggacaggctccaggcacccggggtaatgtaaccctcgatggcgtgggtcagggcgtcaagtccggtggcaaccttcaggccgcgcggcatggagtcggtcagatccgggtccacgaaggcgacgatcgggatatcgtgcgggtcgacagccacgaacttacgcttgttggcggtatcggtgaccacgtagttgatggtcgtctcggaagcggtaccggcggtggtcggcacgccgaagatcgggacggacgggttcttggtatccgcgacgccttccagggacagcacgtcggcgaactccgggttggcggtgatgatgccgatgcccttgcaggtgtcttgcggggagccgccgcccaggccgatcaggaagtccgcaccggactcggcgaacttggcgacgccgtccttgatgcactcgaccggcgggttcggcttgacgttggagaacacctcgtacggcaggccggcctcatccagaaccttggtgaccttctcggcggtgccggtctccagcagtaccggatcagtgacgataaatgccttggtgaagccgtgctgcttggcgacggccgggatttccttgatcgcgccacgtccgaagtatgcagtctggttgaaaatcatgcggtacaccatagggactctccttttgagctcgtgtcttaactggtggtccactctgtctttgagtggcccaacggttccccagtctactccgcgcatgagcattcacctgaaaacacgctgaaagaacaacactgaaaataatggcaagaaatggcggaattccgcacttgtcgaattattgtccattgaccaaaccagttccatcgcccgaaatctcaacgataagaccagtttccggaatcatctgacgctctccgggaaactcgtctctcatccgcttacttcgcgcgtagcgcaatcaatatgcgagatgcctaattccattcgtgcttcatcagccgaacgcgaactggttcgccagatggtgtattcaacggtttcagtctcctgaagaggactaagatacctcgacagttggggtgatcatcataagagaatgaggtagataatggcaaatggcaaggctatgacggtcggcgagatggcgtccctgtttctcgaccccaccactcccgttcgtatcgacgctttcgacggctcgcatttcggcccggcagacgcggatttgaaggtcaaaatcgccacgccgaactgcatgtaccagctgctcgcgcacccgaatgaaatcggcatcgtgcgcgcatacattctgggcgatttcgacgtggacggcattgactacgccgacccgtatccggcgatgcgcaagctggtgtcgctggcaaaatacgttcgcccgctcgctcccgcatccattgcccgcgtatccgccggcattctgagtcacggcttcaagaagccgccggtgcccgccaccgagggcccgagcaagttcgcccgcatcaagcgtggcctgatgccgcacaccgaaaaggccgattcggaaaccgtcagcttccactacgacatgtccaacgagttctacgccgacttcctcggcccctccatgacgtacacctgcgcggtattcgacaacgagcacatgagtcttgaagacgcacaggccaacaaactgcgcctgattctcgacaaactggacttgcagcccggccagcgcttactggacatcggctgtggctggggttcgatggtcatcaccgccgcccgtcgcggcatcaaggcgctcggcgtcaccctctccaaggaacaggccgcgtacgccaacgaatggatcgcccgtgaggggctgcaggatctggccgaagtgcgcgtacaggactaccgcgaggtgcccgagcatgacttcgacggtatctgctcgatcggcatgatggagcacgtaggcgtcaagaactaccagagctacttcgaagagatgttccgtctcctgaagccgatgggccgactgctgaaccaccagatcaccatcagccatgacaagcctcacggcaagcccggcaccgacgaattcctcgaccgttacatcttcccggacggcgacctcggcgcgcccggcttcatcgaatcgtgcatccatgacgccggcttcaacgtggtgcatcaggagaacctgcgccagcactatgcgctcaccctgcatcactggaaccagaacctctccgagcattgggacgacgcggtcaagcaggtcggctttgaacgcgccaaggtatggggtatgtacatggccgcctgcgctctgaacttcgagctcgacggcatccagattcaccagttcctggctgtcaagccggatcgcgtgggccacccggacggcaagtggtatcctctgcgccaatggtggcaggcctgactccgtttctgtgggacggcacgcggtttttaccattgttcatctgccgtcccacagaagtgtgggatagcagatacatcaatcgtctgacgtatctgctatcccgcatgacataagccgagaaccgcagaatagagccgttctttgccctcagctctgagggcgttcttcgaacgctgtgggacggcacgtcgaaaatcggcaaaatcacgtgccgtcccacacgattcccttcgcacgcgcatttcgcaggtgctttttctgcaatactgactctatgagcgccacagccccagaaacggctggggcggacgatcgcaccgaccatgacacgcgcggataagacccacgtttctttatttaaccctaacccgatgttcgcattggtgctgttggcgtgcgtagttgcggcgaggaagacagttgttggcgaacgcgagcctttgcattgaccggccagcccgccggagtaggtacgtgacggatatgcaaaagccccgcacaaggcggggcttcattgtggtggctccgaacggcgtcgatccgttgacctagcgattttcagtcgctcgctctaccaactgagctacagagccatgaacagtcaaaaacccggataatccgggtttcataaccattccagcgaccccggccggacttgaaccggtgacctccgccgtgacagggcggcgctctaaccaactgagctacggggccattgttctcacttgcgtgaggcaacagatgtatatattactaaaattcgccggtcgtgcaaatttcggcgtgttccgcgtaatttcaaggtttttgctatcaccagcacacggacacgtctgccataaacatccacaaaacgacgaagggcgcgaccggaaccccggtcacgcccttatgaacagaagcacttcacggcatccaccgcaaagcaatcgtcaatctcagtcagcctgcttccaggtgtcgacgtcgatgtggtgttcggggttggcctgccaggcatcccacgcggacttgacgatgtcttccacgtcgtacttggcgtgccagcccatctcctcgttgatgcgcttcggggagccgatcaggtgcggcgggtcgccggcgcggcgggccatgacagcctcggtgaacggcagaccggtgaccttcttgacttcgtcgacaatctggcgcacggaggtgccttcaccggtgccgacgttgaaggcgtcgtacttgcgctcgtcacggtcgaggtacttgagggcggcgatgtgggcgtcggccaagtcggagacgtggatgtagtcgcgcacgcaggtgccgtccggggtcgggtagtcgtcgccgaagatggcgggggccttgccctgcttgaggcggttgaacagcatcgggatgaggttcagaatagccgggtcttcgagttcgaccgggccgcagccggccacgttgaagtagcgcagcgcgcagaagcggatgccgaacggctgctcgcaggcgcgagccatccactcgccgaacagcttggtctggccgtaggggttgatcggcagcatcgggacgacgtcctcgggcaccacatcgaccggcggcacaccgtaggtggcggcggaagaggagaagacgagcttcttggcgttcttggactgggtcatgccggtgagcacgttgagcatgccgttgatgttctgctggtagtaccacagcggcttctccacggattcgccgacctgcttgcgggcagcgaagtggatcacggagtcgacgccttcggcatcgaggatatcagccagacgctcgtcggcacccggagcggcgatatccatgccgtacagacgggagccttcgatgcgggtgggcttgccgtagctcagatcgtcgacgacgacgaccttttcaccggcctgatgaagtgcgtgaacgacatgcgcgccgatgtagccgcagcctccggtgacgagaactgtcatagttgacctttccttatgcgggttgcaagtgtcggccgtgtggagttcagcggctgttcacttttggtccgctttgttaccttttgaaacaatttgagtatatcacacgaacataatcgcacaaaacggtggtgtcgtccggcaatatctgcattcattaggtcgatctggcgttcattaggtaggtcggcccggagccggcccgcacggacaccaggtaaatggcttgatatggtggttggtatcgcacaccacccacctaatgaacgccaaatcgacctaacgaatgaacagcggtgcggcgcacaaggaaaatccgaggaatatatgaccgatcccgaatccacagcaatcgattccgtcgccgcgatggccgcggaccacaccgaggcaccgacgcaccccctgcacaaggtgctttccttcgtgcgccgctccggacgtttggacgatcgcctgcagcgcgcctgggacaactatgccgacacatatctgttggatattgcggccggcaacctgctggacgtgcgcgaaggcgtcacgctcgaccgcgcgttcgtggagtcctcatggggcaacgacaatccgctcattgtggaaatcggcaccgggcagggagaaaacgtggcggccgcagccgcggcccatccggagacgaacttccttgccctagaggtctatgaccccggcgtggcccacacactgctgctcgccggcaagcaggggctgaccaacattcgcgtggcccaggtcaacgcgcccgagctgttcaaggtgaccgcgcccggcaccgtggccgaggtatggaccttcttccccgatccatggcccaagaagaagcaccacaagcgccgcatcgtgcaggaggccatggccggcgacattcatcgcgcgctggtcacagacggcgtctggcgcatcgccaccgacatcgaggactacgccctgcacgtgcacgaggtgatggacggcctcgatggctggaagaacctgggcagcataaccgtcagcctcccgttggagcacgtgggcaagggcaatgccgacatggccgccgatatgccgcacgccgacttcaccgaatccgagcgattcgagggccgcgtgctcaccaacttcgagaagaagggcctggccgccggccgcgtgattcatgacttcacctatcaggccgttaccctgaactgattgcgacacgccgaaatgccgtcgatttgcataaccgaacaacctcccgtaaagtaattcgagttgttcgcccccatcgtctaacggttaggacaccagactttcaatctgacaacgagagttcgactctctctgggggtacccaccggctccggtttccacgaggtatcgtggcccggagccttttgtttccaacggtttcaggccgtcagctgggccttcagacgggcgcacaggaaacccggcggtggccactgccaccaaagatgcacctccgtcgccgctcattccgcgcatcatctgctcgtacatcgtcgcatccagaagatagaggggcgagacgttgaggaactccgccaccgcggcgatgtcctgaatggtccaggtggtcttgcccgtcatcttcgcggacaccgcacccttcttcagccccaacggagcgcacagggcctgctggttcatcccacgtccggtcagctgcatgttgacgttccagatgaacaccttctgcatgtagtcgccgagtccattgatctcgggcgatgattcgacattcgtcatatcaagttcctccatattgcagtcgtctaatatcgatggacataatcctacaacagcgatttgcttcgacgcaagttccttgatatattgtctatcgtgaatggactgaaagcaggaataatggattctccgatgcgtcgctacatgttggcggcgggtctgagctgccgcgccctcgcgagggagatgggcaaatccaaatcctcggtcgccgggaaggtcaacggctccataccgtggcagcagtccgacctggtctggctggccattcaccgaaacctgtccccggggtacgtgctcggcatcgacgcctatctcacggacggcgggtggaaacccgaaacgagaatccccgaaccggctggaacccggcgcggggattgaacggcaacaaccatggagcatgcgggcgcgcatatccgccaagatcagacgcccgccgttccgattcccctaaggagggtcatcaccatgaccgattctaccaatatcgccggcgctcgtccggcatatgatttcgagcctatccgtacgcgcggcgcagcgcggcggacagcacgggccggcgggaacgtcgatctgcgcatcgcgaaggcgcatgtgctgtccatgctcgcccatccgtcccggggctcgcgccgttgaggcgcgcgtccgaggaccgtttccctgataccggccgaaccatgtggtggttggtcgcagtcgccgtgtacgtatccggcggcgttctctcgtacgctctttgccgcgcggcccgtttgagcgacgacatcggcgagaggctgcgtgaacgccgtgaagcggatccgtcgcatgacgacggggaggtcgatcgatgagcagcagagcagagaactgggcatgggagcgcgacgacgtcaagggcatcaccaagttcgtgctggtgtatttggcccgccgcgcctactacgacgatggggccgccgcgtggccgagcgtgaagaccatcgcgttcaactgcgggtgctgtgagcgcaccgtgatccgttcgttgcaggagctggagcgcaagggctatatcaggccgggcgatcaggagatgtcggcgcgcaacccgcgcacccgcaagccgatcgccaaggggcaccgttcgcgcgtgtgggatgtcatcatggatggcgaccgccccgtcgagaacatcgaggagaggccccggaacctggacgcgctggccgatcgcgaaaacaatcccgaagcagacgaggacaatttgtcacccgacggatcgtcacccgagccgaagggcatgggaccgcggacaaattgtcccggaatcttggacagaaagtcacccaatagacaagtgataaacaattctcccctcatccccttcggggatgctcccctcaacgacgaacaagccagcgcacagccggctgccggcccgaatcccgaaaccgctccgacgaccgattggggcaaggcattgcctccaaggggttgcaggaacccgctgtgggtgcccgacccgggcaagctgcccgaaccggtcacggaacgcgccgaccaggaggtgcgcgtgctcgacggcatccgccgacgtatgctcgccgtggaccagaggttcgacgtgccggcgaccatggccgaccgcaaggccgttcactcgctgctgatcgaccgaccgtacggcgaggtcgtcgcgacgatggactgggcgtaccgcaaccgctactggctgccccggctcgccagcggtgccaggttcgccgcgaactacgtgcagctgcggctggagatgctcacccatcccgacccgacgggcaaacgggcacccgacactccgctgccggtcgtcaaggatcccaaccgggcgataccggtcagctcatcgtccgcaagccgcgtgccgatctacggggcggcgctgctgcgcacctcgctatgccaggagcacatcgagggcgccgttccgcaggaggcgtgcccggtatgcgcgtacgacaaacgcaaccacgccacccacgacgtcgcagggcggagcaggaccaaaaccgccgcaccggctgaggcggtacggtcatgagcggggacgggaatcgtctcgaagaatggaagaaggccggcgaatgccgcgacttcccgcagccgtggtccgactacctgtggtcgttggagttcgagcaccggcccgacgacgcgaaggcgttccattcggtcgccaaggccgtgtgcgaacagtgcccggtacgcgccgaatgcctggcctacgccgccagcggcggactcgaatggggcgtgtacggaggcaaggtgtgcaccgaccggcgcaggatcgcgcgcatggccgaagccgacggcgtcccctgccgggaccgcagcctgccgtggccacagcgctggcggctgctcacggactggatccgctcccacctgaacgtgttcgacgaggccaccggcgaggccagcgccgaacgccagcaacggcgtcttcgcgcacgccggacgggccaaccatcacgccccacatgaccacgtcggacaatcagacaatcaaacaagcagtaatccaaacaaccaggcaagcagacaatcaggcttgcatggttacaggcaatcgcaaaggagaagaacgaatgcgcatcgccatagccaacgccaagggtggggtcgcgaagaccacgtccagcatctacatcgcctcggtcatcgtgtccaggggaggcagagccgtcgtgtacgacgcggatccgcagtccagcgcgagcctgtgggcttccgccgccgaacagaccgcgggcccgctgacgttcgacgtgctgcccgccaaccaggccacgctccgccagctcgccgcgggatcggatccggacgaatgggcgatcatcgacgcgccgccgcaggggccgaccctggacatggccatcaaggcggccgacttcgtgatcgtgccggcatcggactcgcccatggatctccagcaggcatggagcaccctcgacatggccaggatgagtacgcccgccgcgctgctgctggtcaaggccgaacgcagcacgaaggcgttccacgacaccatggacgccctcaacgccatggacacgccccggttcgacacgatcgtgccgaaggcccagtcctacaagcgttcgctcggcaccaacccgcaccagctgggcaaataccgcgacctcgtcaccgaactccagcagatcgccggaaagcaggagaccatgcagggcaattatcagccgctggcacgaccggcaccattcgatgacgtgctgcgccaacagaacaagacctccaagaccgcgggcgaaccgttggtcatgctttcattgcgcatacccgtgtcgctcaagacccggctcaagaccacggccgccgcgcacgacctgcccatgcagcagctcctgcgcgccgctatcgagcgcgagctcgaccggctcggcggcgacgacgagccgtaatccgtcggacaatcaagcaatcaagcaatccagcaagcaaacaactcaacgaccaagcattcaagcaatcaacctgcagacacgattccatgagacgcgccgcgtctgcggaaaggagccactatggactattcgatggaggtctccgcgctcggcgaccggatcagcatcggcgaggaggcgcacgtcatcaccctcggcgtgagcacgggatttcccgcgggttccacggcgggtctggcatacacgctttcgccgttgcaggcccgtgtgttcggtgcgcagatgcgcgcggctgcgaacgctgcggaggggcatccgggcatgccgtccgacgaggaggtgaacgcggcggcgaaggtgttctgcggcggcgtgtggaacgggttcgatcccgccaccatgatgccgaccgaacggttcgaccggttctggggcgacggcgagggccaccagctctatctggcgatcgcacgtcacgcgctcatcgccgcccgcatgtccatcctcgccggacaagccgaaagctgacaagcagacaagcccgcatgcagataatcaaacaatcaaacttgattgcatgcaggcaatcggacatgcaagcaatcaagcaagccaacaatcaggaaaacaaacaatccaacaatcaggaacggagcagaaccatgaacgacaaccacaacgaagacgaagcgcccttcgatggcacgagcgaggattccacgctcgaagaccagatgagcgcgcacatcgcggccatcgccgccagcggcgtcgccgccgaagccgaggccctggccaaccggcaggccgacatggcggccagggaacgccgtgaaacgcgactggcaatcctcgccgccatcgctatcattggcgctttcgctatctgcgtcattaaaacgttaaaaaaatatacatgacccggacgataatcactttgataaatatagaaaattaacccaattaaaccaattgttcctcagattgcattaggccaataagtcgccgagttaaactgacgtttttctttagttttgcggttcttgtttcaataaacaggaaccgcctattttttgacgataaagaaaagtagcagatataaagcaataggataaacaataaaacacagcttacataaaacaggcattgatgagacgtaagaataaaaatcatactcaaatacattgatgcggtaaatgagaaaactgacaatgcaatacgataaagtatttttagtggacgaatttctttcgtcaatccttcaaacacctttattgaatcataaaggatgcttcctagaacgtaaactgacaaccagtaaaaaacaaccaatgtaaaagaaatcaccaaattggccaacaataacttatgctgatgcacggatgagcaaacatagaccagaatcacaaacgacaatccgatactattaagagtcctattccatcttcctacactgcgaaacacatagcgctttcttttcctattggcgacattgcatagctctttttccgcttcgtgcaatctattggataattccttcaatcgagtacgataattcacagatatatcgcctatgccgtaaagcatagtgaaacaaaacaataaaccaaaaataagaagaacaccaagtcctttcccataccggagaatcagactagcggatgacaggccgagaaagcagacggaaagattactgaatcgtatgagcgttctacccatagatctgaatctaaacatatgattttttgaaagatcctcaactgcgatacccacggaaagacccgcaactatcgccaataaagcgaggataatagacaggcctgcatcttctgcaaaacaggggaaagcttttagtatagattccgtcttatcccaagaagatttttctgccaactcatttaaagataattccttataatgacgggctatggccgaaatagaggataatattattccaataataagccagaaagactcatatccaagccatcgtaaaaattcagcgttttcaaccttgttgtcattatatatactatctaggtcgattccctgattaccaaccgaaatatgatattcattattgcgatatagcggacttttataaggtgcggagatatgtttttcatgtattatcatattgtatacttccttgtacgtaatcatctgcaattcatcgacaatgtcttatcgactgcgaatccgcgttccatatagtcctcattatctacatcatgcccgcatttgtcgaaactgaaatagatgcgaaatacaatgttatagacgacctctgcgttatgttacaaatactctaagtccatattcttaaccataattcgtgtccgcagccggatggtcctaggattgctaatgcgactccaggctatccagctacggatgacctattgcagttcgcctgccaggtatggttccacgaaggcgaggttgctgccgcgttcgagtgagtggaagtcctgcatggcgtatcgccaggattcctcccaagtggccgggttgccgtgtatgcgtcgcagggattggagagtcgtcgagaacaggttcgggtcccgtgtgaagcggtcggccagtttgatggcgccgctctgcttgtgctgcgcgtccaggttgtcggtcctgccgcggaacgcgtgttcgaggttgcggctgacatagaacagacggtatggaatcaagacggtgcgaccgccctgcttcttcctgaatccgtcgagtttgagcagggagcccacgccgtttcgcttggtcgtccggtccgcgatcagagcgtcgcggttcgtggtgacgatgtcggtcgtcgaatacagggtttcttccgctgacgggttctcccgcacgctgtcgtcaggcgcgaacgcaccgtccagatcgcagatctggatgacatggccgagctggccccatgtgcgatcatggtccttgagataatactcaacgagttcgcgcaccgtttgcgagggtttgtccgcggggtagaacccgttgcgccgatggaattcctcgcggtggttcggcgcggtcagcacgtcgcaatggaattcctgaccttggaacaggcggttctcgatcaacgccgagaacgccggcacgagcaggctggcgtcgctcgtgccctccacgaccagcaggacgatcttgcgtttagccacggtccgcctccgtcccggcggcattgagtgctgccagatcgtcgtcgatgtcgtcgtcctcgtcggggtggccggcggcgtagaggctgttgccgaacatgcgcggtatgggcgaatcatagatgtcggggccgttccatccgagctcgctggctgtcaggtaccgtttgcgctggttgttcgtggaggacttacgggggatggtcgcgaaccggttgtcgggatcggtcaccgtcgtgcgaatgcagctgttcggcaacacctccaacgcacgcaggttgtgggcggtgaacaccaattgccccgcgcacccgtccgccaactggtccagcatgtcgccgagcagcagttcgaacacgccggagtcgaactcgtccacggcgaccagcgcgttctcgtcgttgtacgcgtgcttgaggtagccgagcagcgcggtgatgcgtatgatgccctcgctctcgcagcggaagggcaccatgacgtcgccgcggcgcgagaacagttccgcggtgacccggtcctcgccgtccttgccggaaggcgcggtgccggtcttcagcaggacgtgcaggccgggcacgatggtgggcaggatgcggtcgaaggactccacggtctgtccgagccgcttcgcctggccgggggtcagtggattgggctgcagcaggtcgaacgggaattccgtgttgcggccttccgggttctcctccatgatcgggatgatcgcgaacgcggcgtaggagccacgacgggtggtggacacgaagatgtcgttggtcgcgtaaccgcacagcgtctcgcgcaggcggacgaactcgccgaaacgctcgttgatatacgtcaacgacctggaggacacgccattcgtctcccgcacacgggccaccgcccagtcgatcaggaactcggcgtccggccggtcgtcgagcgtggcgcaccgggagaacaggaacgaacgcccttccatgtacgcgcggtccgcggtgcgcgagaccacggtcttcaccgaactgaccgcctcgatggaacgccacacgtagaccggggtcgacacgaacccgtccgcctcggaatcctccatacgatgccccagcacctcacggcccaaacgcgagggatcgtcgccgatacgcaccgattcggcgacgacgcgcgcccgcgtcgaatccggattcgccttgcgcatggacaccctgtactcaagatagctcggcttctgcttatctccaatgaggaacgtcgccgtcacggtcgccgaaccggcgctggcgctgacgacatcaccggcggtatccggcagcatattcccggacaacagcgcgcgcagtatcccgatggcgtcgatgacggtggtcttgcccgacccgttctgcccgtaaatacccgtgacgctgccgccggtgggcagatcatcgaaatccaagacgccatgcgatatgttcctcatgtcatccagaacaagtcttttcaaacgaatcatcacattgccattctctaaaactcacaataatcaatttttaattgaaatacatgactattatacagcgtaacctgtgtgcataccaccgcgtttcgtaatcagatcataaccggagcgacacaacagccccgatccacgatgaggtggttcgaccgaggcaacgtttgtccgccgcagaggaacccgacgcggggtgatgctgatggtgcgttcggggtccggcggccggccgtcgggcttgcgggcgtgcttttcttccagggacccgggaggaggcgggttctggagtccccgtctcctccctttcccggagaggggcttgtgattgcatgtgggaaaggatttcgtatgaggttcgggaagaagggtatcggcgcggtggcgtcaatcacggcagccgcggcgttgctgacatgtctggttccggttgcgttggccgataacggcggtggcggttccggcgagggaggcggaggcgaccatggcggtccttctcagaccgccgacgtgcattggatctacaaggattcatggccggccacgctggatggcatgaagtcagcgctgcgcgacgcaaacgtcacgctgtcgtcggacctgtctgatggcgcgaacgagtacgtggacatgaacaagaccttgagcgacgcgatcgatgagtgccggcgctcctatacgggtgagggaaacgcggactgtcgtatggtggccgtcggatacgcccggctcgggaacggcttgttcaatggcagctatgtgagttcgaatgcgaagaatcgttgggaggcgcagtggagggccgaggcgaagggcgactacacgtatcaggggcagaagtactcgacctcgaccacgtggaaggacaagctcggcacacgcagcgttgactctctggcgcaggagtcgatcaactccaacccgaacgcctcgttccgcgtgattgtgctggcgcagaaccagccgccggtcgattacaagctgaacgtgaccaccagccacaagcagaagaccgacatgcaggtcggctccaccgacccggtcggcgacgtcatccacgccgacaacggcggttccgcgatcaaggagacgttgaacggcaccgcgatcatccattacgagaacggcccctacctgcccgcgaagagcgtgagcaagccgatcagcttctccagcaatggggacactcagctcgacgatctcgcctcgccgaaggatttcggcatgaaatactgggccgagggctcgtactggatcgacatccaggtgcccaagcagggccgcatgcaggcggccgtggacaccgcggaccgtgacccggccgaatcctggaaggtgagctcggtgccgcccgagcccccggtcaagaagatcgaggacggcgtgagcgccgaccggatgacgaaccgcaccaccatcacatacggcaccggccgcggcggctacgagatgcgtttccgcgacgtgatcgaacccaacggcgtcgaatactccgtggacaactacaggctcatcgacaggaccgacgacaatcgcgacgtttccggcgagttcgaaatcacttgggacaaggcgtcgaacacagtgtcggccgctcgttcggcggacaagggcgagatgcccatggaccatgtctacgagttcagcttcgacgtgaccgtgtcgaagccctccgacttccagcaggtcaaagaccatgcgtggggccagtggaaccacgagcccgaggccgacgccggaaagaaacagttcgatacgtggcggccgaatcctgacaagagctggatccgcctgaacgcgaagggccagtgggaggcggtcatcgacccgaaggagaccaaccggaccggcgccgacgatatgacgcttctggacggggaccgggtcgcctcggtagtcaacggcaccatcgccaagaacctcatccaggccccggagaccctgacgctcacggacgactggtcggcagccgactacctgttcgacgccgacgacaagtcgaagatcagagtgtacgaggccgacgccggcaccgatcgcgagtccagcgtcaccgacatcgccaaccacggcagggacgtcaccgaccagtggacgatcacgatggaaggcaccacggtgaccgccaccgcaggccagacctaccgcgagggattgaaggggctgaagaccgcgaagcaggtcacgctgctcatcccgggcaaggcggcctacgccaacggcaagggcacgggccaggtgcgcgacgacttcggcaagcagtcgagcgacgaactgtcgttctgcaccgcgccggacggcaaggcgctgacgaacaagggatcccagagcgtcaacacgcacaccatccccacgaacgagccgaagatctgcggctacataccgcccgtcgtcaaggacgtggtcggcgaatcctcgcagggaggcgaccaggcgtccgtggacggcaaggtcgtctacccgggccagcgcgtggaataccgtctggagacccagccccacctgcccggcaatctcgcgtacccggtcggcgaggtggcggtcaccgacacctacgacgagcatcttgaagtggacaagcagaccctggaggtcaccgacctgtccaccggcaggttcatcccgaagaccgagtatgagacccagtggaacgacgcgcagcacgcggtgcgcctcgtgttctccgacgggtacgtgaagaccaactggcgcaacggggcgaacccgcgcatcatcgtccgcttcgagggcacggtcgccaaggacgcgcccacggacaccaaaatcggcaaccagtgggccctgaccctgaacaacatgatcaccccgagcaacaaggtatggaacgagccgcccgacttcactcccgcgaagaaggacacccaggccgacccgtccatcagcatcgacggcaagaccgcgctgctgggcgaccgaatctactaccgcgtgaccatcgacgccaagcagaccaaccaggcctacaaggtctggagactcggcatgaccgacgactgggacgacgaatacctctccctcgacgccaagcacatcgaggtcaccgacaccgctaccggcaaggacgtgaccgcgaagttcaacatcgcggcgatcgacggcgtcgcctacgtgtacgccaggaccgcggacacgaaagtgccggccaccggcgagatcatcaagggcgacccccagcccaggaacctcaaggaatacgccgaaaagaaaacccacgacccgttgaaggagccggccatcgaccagtcgatgctgggtacgagctacgaggtgagcctgccgatgaccgtcatcaaggtcaccgacggacatatcgtgaagaacaaagccacgcaggtcgtcaacgacacccgcaaggacaccaacgaagtcgccaaccccctcaaacccgtcaacccctccaaggacgtggtcgtgaaggtggacggcgaatccatcgacaagcacagcgtgtacctcaacagcctgttcctctaccgtctcgacagctccgtgctgcccgcgcaccgcgcctaccagaaggtcaccgactggagcatcaccgacccgctcgacaccgaacatgatcagtacaccggccaatgggccgtgtacgccatgcgcgacctgaccgaacagggcaaggtgatcgcccgcaggggcgtgaagatcgccggcagcggcttcgacgccggtatgtacggcggcgaactgttcaccctcgcccaggatgacaagggcgtggtcaccgtcacggcgacccaacgcatgctcgacctcgtcagcggcaacgacgaaaacgagcaggcatggaccgcgttcatccagtgcaagcgcgtcaagaccggcgaacacatcgccaaccggttcgacgaaacactcaacggcaccagccgcccgtccaaccaggtcgagacgcacacgcccgacatgaccccgagcctgaagatcgagaaatgggacgaggcctccggctggccgaccggcgaccgcgaccaggtcaaggacgcattggccatgcagggcgacacgcgcatcgtgttcaccatcaccaacaccagcaccaccgaccccgacaccaagcagggcgcatggtaccgaaccaaggacctgaacctcaaggaccaactggtcgccggcgacggccaagtcaccgacctcgaataccccgccgactgggacacccatatcctcaagcccggcgagagcatcgaggtcaggggcgtcctcaagggcgtgaccgaccatcacaccgaccgtgtcacggtcaccggcaccccgctggtcgaatgcgtcgtctccgacccggatccgttcgacggcaaggacgagacgtccacgcccgataacgcggtcacgatcgacggcatgctcgtctgccccgacaccgaggtggtcagcaacaccgatgactggaacggttaccggaccgggctcgcccacaccggcaccgccatccagggcgtgatcgcagcggcaatcaccctgctcgccgccggcgtgggactggttgtttatggtcaaataaacgtgtacggcgtcaccaccaaatctgaacggcataagcgttcatattggacacggacggcggacggaaatggcatcggcggaagaaaagcgccggtgccgtacggttcctgatagattcccgagtgctaacaaccaacacatggtcctcgggaggaaaggaatgacgacaccggtgcgtattcaacagagtatcaggcagctcgagacgaaaggcctgacgcatacgcagatagctagggaactgggcgtttcgcggacgaccgtggtcaagtacgcgacccgcgattattcgcccgttccgccgaccgggggaactgcgagccgttccctggtcgcgggcgagtacgcgcgcaaggccgacgaatggctcgaggccgaccggcgcatgccacgcaaacagcggcacaccgcccggcgcgtacacgagcggctcgtggaggaatgcggcttcgagggcagttattcgtcggtgcagcgatgggtcaagcgctggcgccaacgccaccgcggcgaggccgaggggttcagtgagctggaatgggcgccgggcagcgcgcaggtcgatttcggccaggccctggccgtggtcgccggcgtggaacggaccgtgcatttcctggtggtctcgttcccgtactcgaacatgagatacgtggccgcgctgccgggagagaccgcggaatgcgtgtgccatggtctgaacaaggtgttctcccatgccggcatggtcccccgcgtgctagtgttcgacaacgccaccggggtcggccaccgcagggccgacgggaccgtcacccagacgaggctgttctcgctgttctgcgcgcactacggcttcgagacgaggttctgcaacccctattccggctgggagaagggaagcacggagaacgcggtcggtttcctgcgccgcaacctgatggtgccgacgccgtccgcggagggatgggaccggctcacggacgcgtggttggaacgctgcgacgagatcgcgcgcggcgtccactaccgcgaggacgtgccgatccgggacctgttcgagacggacctcgaccacatgctcccgctgccgccgtccatgttcgacgcgtgcgactggcgcggggtgaaggccgacaggaccggaacggtcacgatcgactcgaaccgctacctcgcgggcccgaaatggcattccatgcgtctcatggccggcgtgcgggccctgcgggtcgagctgcgttccatggacggcgagccgatcgtcacgttggagcgcaggtgggggcgcagccccgacaccgcgatggacccgctgtcgctgctcgccatcatcgcacgcaagccgcgttcgtggggcgagagtcccatacgctccgacttcccggaggagacgcgcgtgctgctcgaccggatggagccgcgcgaacgcggcctgctggtcgacgacatccgccacgcggccgtggtgagtggcttccgtgcggccgtcatggccgtcgtcgagatcgtcgccgcgggcagaaggcccgacagggccgcgatcgaccagacggccaggcggatcgcgcagggcgacggtcccgaatcgagggccaggctcgacacgtacagcaggttcatgagggaggacggcgatgagtgagtcgacggacgccgcggcgggcggacgcaggggcgggcggaccgtgagcaagtccaccccggacgaggtcatggagctcgcatgcgggctgccgttgaccaggagcgtgctgcgttccgtggtcgcgggcgccacgcccggccagctcggcgtgctggccgacctgttcagggccgagaacgccagccggacggaatccaggcgcgccaggctgatcaggaacgcgggattcccgtgcgtcaagggcttcgacggatacgactggggcatggcgtcgttccccgccgactgggggcgcgagcagctcatggacctcggtttcgtggaccgggccgaggacctcgtgctctacggcgacgtgggatgcggcaagacgcacatggcgatcgccacgggcatgctggcgtgcgagaggggcatgccggtgaggttcttcaccgcgtcgtcgctggtgatgcgtttgcggcgggcgagggacgagaaccggctcgacgcggaactgcgcgcgataggccgcgccaggctgctggtcatcgacgagctgggctacctgccgatcgacatcgacggggccaggctcctgttccaggtcgtcgcggattcctacgagaagcggagcgtggtgttcaccacgaacctggagttcggacggtggggcgaggtgttcggagacggcgacatggccgccgcggtcatcgaccgcatcgtgcaccacggaaggatcgtcaggttccgtggcgagtcataccgcaacagccactccctgatgaaataaacgaaaagagcggaaccaacccggccgccggtgacggtgtccattttgaacgccgatggtgttcagattaactggtgacgacacgcagatttatttgacgaaagacactggtcgccgcccgcaggttcaggcgcgggaacaacgccgccggccgccactccggcacgacgcaacccgtcgatgccgaggatgccgacgcggatgccgtcgaaaccgcggattcggttcccggcgggcaatccgtggtctgaccgaagcggcagggaccgttctccgccgcgatgattcttccggccggatgccaatccggccggaaccccgccggttctcttccttcttctctccccggcggaaatttgtggggctgcactcgttcacgagtgcagccccacttttatacctgttgaatgattaacatcttctttaataaaaacaaaccgttcgaattaccgttcatccgtgacgcacgcaagaaacgttctacaacgttactgtatcccagaattccgttcgaggaatgaatctaattgcatttaagtgacttttataaagtagttttccacagattagcaaaatatgtgttttgcagttcttctgcggaagggcgagcatccaatacctcaatcgaaagatggaacatgttgtgatatcctatccacccgcatgtgcacagcacacgccgccgcgttttcttcatggcggagaccaacgggttgtccaacaaactcgacaccgtattctgcaacactccgacccgttctgagatctcattgagcgtggccatgacaccctctccgcaaactgcagtaaagagtcttactgcagagagacccgagaagacatgctcgcggtattgacggcgtagaaaattactcacaaccggcaaatcaaacatgtcccagacaggagatgatgcataatggtggacgctccacgaagacatattcgctatgcaacttttttagacacagagtcacatcattttataagcacagttcttgtcatacgcatactgttcatcgaaggggatacggcaagaagagaatactgtcagtacttctgttggaaggaatatgaacaggcgcgaggacggtatctcctgttttggtatctattgccaagatgttcccaatggctttaatcccattctcctctgatatggttttatccctgatgagaatgaaagctttgttttgggaggaaatagcctgagtgacatcctgggtgtcttttatagttggaatatcaagacatttggcgcggtcaatatcatatgaattatcagaaatgggacatgcttgtgtggaaccaataatccacggccatccctttacagaaatgagagaatgaaagtctgactccaatcgtatgcttgccaccctctctaaggtactggcgtcaaacatatctatctgctctggtaacccattaagatcagtaccaacaactagaagttgtttattccataagaccagttgattataaagtaaattatcgtctgttaccttctcggtaataccccccgtcgagaagtcatatctgattattttaccctgatatcgattggaactcagcgtaagttcgtgaccgacgatgaacatattctcatctgtagagacttgatcctcggtatatattttcagtatacgcttctccaacactttgccgttggaatcttcaatgactaatagattgagatatgaatcatcttcaggagaatcatttccattcattactgcagaaaccccaccgttatgaggttcaatcgacataactccggagtaattgggatccgaaagaagatgaatgagtttggatttactatttttcccaataatcaaatgagtgttatggcgacgccctcccgcaataaaaataccgtctttgtatgaatattcagccgcattctgcaagtcccccagaggctcgtcatgaataatgctgccttgctcatcaatcgtgagtattccacctttatttgacgaaaacatgtccgaatatacaattttataagctgcagataggtcggatttctcatgcgagctgacaggtagaaagcacaataacaaatacgtagccaatagtgtcaccaagagaatactcattgccatcgccacgatgcgtcttctatttctcattttattacctcatcgtgagtcatccccaccctcatgcaaaacgaggatggggaaaatattatgcacttacactctcttcaccacataggtgtttgaggaattgacaagatccgctggcgctacgacaccattggggatggagcctgtttcagtgtcaatcccgacgctgagccatgccctccacaccagttggctgcaataaaattgatcagttctatatttattgaagaaatcccaactgtagggtttcccaacctgtctagctgcatatgcggccgcattggagaactgaatagaagatgctccgtaaggccttacaagaaaatctcctctcttataaccccaatcattgatgatatctttgaacgcctcctatcttggtagggctaaaaatcttctcgtaagactcaattgtcgtcacatttgaggaagagactattgcggcgtgcccgacaaaagcgatactgccagaatctataagagtgcttactaggatgtctccatatgttccaagactgttagcaagtggaactggttctccggcttttgcatcgtgttgtgcagcttcttgaccttcagcaagaagatgcggtaggttgcgattgatttcagcaatcgtttcctgatcctcctgatacactttcgcatagcgagaatcggtagggatatcaggacgcggaggggcgtcggcggcgaatgcgattcccggagccgcaataaaaaatgacaaactcaagaatgcagagagtgttgctttaagggttttcatagttagtccttagtgttcattaggaaatgacgatagataggaccacccgtttcgacgcgggatatagtatagaaagaagcgatttccgcaaacatacattttcagtattgcagctctcaagttgagcggttcctgtttcccgctcgattgtcatctttagatgacattctgtccgctgtctctgcagtggcagatatggttgtccgccgttatcataccggttttccctgacgatgggtgtcaacggaggccgttgcctgtcgggctccttgatcgtcgtcagaggaggtctgtcgtggatttgttgaatcaggtgcttcagttgttcgtcaggttcgccacgatcggtggtggcctgtggctggtgtggggtgcggtcacgttcggtggtggtttgaaggatcataacgggccgcagacgcagtcggggttgtggcagatcgtgggcgggggcatgatcatcgcggccgcgcaggtcttcaacgcggtcgcgttgggttgagtcggttcgggggcgtgttgtggaggacttcatcgtggcgatgctcaacatgatcggcggcggcggtgccggttcggtcacggccggattgttgtcccaggcgccggagacgtggaatcccgccctttaccagttggcggtgagcgtgcatgaggtggcggtcaagcctttgacgtcggtggtgctcgcggtcatgttcacgttggagctggcgcgcaactcgactcgtatcgaggcggaccgtgatctgggcgtgaagatcgtggcgggaaccatgttcaggatcgcgttggtgttcatcgccgtgcggaacgccggtctgttcatcggcatgttcaaccgggtcacgcagttccttatgcagggcgtgtcctcgcagatgtcctttgaggtggcgggcgagggtggccagttgggcgatctgatgcgcgaccagatccgtgatgcaggtgtgatggggcaggcggcgttgttctttctgctggtgatcccgtggttgttgtcccagttggcgtcggtggtgttcacggtggtgctgtatgtgcggttcatcgagttgtatgcgttgacggcgtttcagtcgttgccgttcgcgtttctggtgcatgaggataccaagccgatcggcgtgggtttcttcaagtcgtatgcgcgtacgtcggtgaatgcggtgtgcgtgttcgtctgtctggtgttctatcagcggatcgtggtcgatgccgtgaggatcccggattccgcggacaagggcatggtgtcgtgggtgacgggcaatttcggcaatctcatgatggcgggcatcctgctgttcttcgtgatcgcggtgagccagcgtgtcagccgcgccatagcaggcggcgaatagccgcatcggaaccggggccaatcggaaaggattctttcatgttgcagatgcgcgtgtataaggagatcgccaatgtcgaggcgaaggtgatgtgggggctgggctggcgtcaactggcggccgccgcgtgcatgctcgtcctgggcggcggggaggcggcgttgttctggtcgttgggactgacggacctaggctcgtatctgctgttcgtggtgtgtctgccgttcgcgctgtggggctggtggcgtccgaagggactgaagccggaacggtatctgggatacatgctgcgccaacgtttcggcccgaaggtgtatccgctcgaaccccatgttcccgcgagattccccggcaaaccgtcgttgaaggagaagacccgtaaacgaatcggaggaaggaaggcacgtcgtcatgtctgacatcaacggcagcaaagcggtcaaaggcaacgacaagcgacatggaaaggccggaaaccggcgctccgggaatcgtcgcatacctcgttcgtcgaaggagctgcttggctatgattcgatgctgtccaacgggatcgcgtatctgggcggcgaccggtggagcgtgtcgctgcggatcagcgacatcaactatcaggtcgcgacccaggaccagcagctggacgtcgtggaccggtggggacgtttcctgaactcggtcggcgagaacatgggtgtccagatcacggtcgccacacgcatgctggatcccgaggaggtgacgcgcagcatcgccatgcccctacggggcgacatgctggatgggttgcgcggggacttcaaccgcaatgtgcgccggcgtctcgccggccgttcgcagggcgcggtgacggacaagtatctgacgctgacgctgcgcgagcgggacggggaacgtgcggtcacgctgctgaaccgcgccgtgctgcgtgccacggcgcaactgcggtcggtgggcggctgcgtcggcgtgcgcctggaccgccggtcccggctggaggtgctgcacgggatgctgcgtcgcggcacgcggttcatgttcgacgaggacggcttcctgaaatcgcatggcatgtccacgaaggattacgtggccccgttcgccgtggacgtgtcggaccgccggcggctccggttgagctcgggcaccacggaagtatggcaccagtgtcttctggtgcgggatttcccggattacctgagcgaccagctggtgtcgtccatcacggacatcaaggcggatatcacagtcggcatccatctgtccccgcggggcaaggccgaggggctgaagctcgtgaaccggacgatcgccgagatggacatgcaggccatcgacgagcggcgcaagaaccgcaaacagcatctgcccgaagacatgctgcctcatgatcttcaggaatccatgagccaggcgggcgagctgcgcgatgatctggagcataacggcgaccgtctggtggattccctcatgatcgtggacgtgtcggcggacagtcgtgagcaactggaccagacggtccgtgacgtgacggccgcgatcgatgggcagtcgtgcgtggccgagaccttggcctacatgcaggtggaggggttgaacgccgtgctgccattgggcaatcccctgccgccgatgcgccgcacgctgaccacgtcgagcgcggcgattctggtgccgttcacgtcgcaggagctgttcgagccgggaggcgtgttccatggagcgaacgcgcgcaccggcaatcccgtggtcatcgaccgcacgaaaggcatgaacggcaacgggttcatcctgggcacgaccgggtcgggcaagagccaggcggcgaagaacgagatcacccagatctatctgacccggccggacgacgatctgatcgtcatcgacccggagcatgagttcacgccgttgtgcgacggtctcggcggcgaacgagtcgagattggggaatcgtcgcgcgcgcacatcaacgcgctggacatcgaatatgaagacgattccgaaggcgacccgatacggtcgaaatgcgcgagcgtgctgaacatgctcggcgtgctgatcggcggacaggacggcatcgaccgcatgcagcgcagcctgatcgaccgcacggtcatcggcatgtaccgcgaggtgagggagcatcccgaactgggcatgcccacgctcgccaccctgcacgaccgcctcgccgctctgggcgagccggggggccgtgacgcggcgcgcgcgttggagatctacgcgaccggcagcctgaacgccttctcccatgccaccgacgtggacacgtccagccggttcctcgtctatgacgtctccggactgggggcggagctgcgcacgttcggcatgctcgtcgtcttggaccagatatggaaccgggtcgtcaggaaccgacgtctcggccggcgcacctggctgtgggtggacgagttccacctgctgttctcgaaccggtacgcggccgaatacttcctgcgcctgtacaagcgcgcccgcaaatggggcttgagccccaccggcatcacgcagaacatcgaggagctgctggccaaccaggacgcgaggctgatgctcgcgaacagcgacttcctcctgctgctgaaccagaccgccacggatgctgacgccctgtgcgaactgctgaagctgtccgacgagcagcgggcgttcttcaccggcgtgcagcccggccagggcatggccaaaagcggcaccgcgttcataccattcgacgggcgcatcgacaccgacagcctgctctaccggctgtacaccacgaaattcgaggatcggaaacccgcatgagacccctcgcccccagctcattccgggccacgcgcaatctcatacggccgaacggaaggattcccggactgcgggttcggcacatcaacgggatctcctctgcccacgggccggccggaccgaaacgcccacgggccatgaaccgcaacggtggccccgaagccccgcatccgaacggcacgacgcccatcgatgctgcggaacgcggcatcgatatggcatggtccgtgctcgaatcgcaaccggcacaggaggaggacagcgaagaaaacaatccgcagccgacggcagtcgccggccggatcggcgaaggcctgaacggcgtcccgcgcaggaagagcgcgacgggcggcaccatggcgcgcgtcgcggcggggaggagggtctcggcccatgccaggcgcgcgcgtcgttccggcaaggccgcgcgatcgggcggccggagggccagatccgccgccaaggcctcgacccaggccgcacggcaggccatacggatggtcgcacggacggcgatggcggtgaaggccggcatcaccgcagcggcgtcggccacggtcggcgtcccgatcctgctgggcgcggtggccgtgctgatgatcgtcagcctgttgctgtggttcatccccaccgtcgccgccggagacggcggaggctgcgaggccggcgtgatcgaggtccctgacgaggcgaagccctgggtaagcgaggcggcccggtcgagcgggttgggcgcggatttcatcgcggcgctcatggaacaggaatcgggtttccggccggatgcgtacgccgacgacagcaacggcggcacatggggcctgctgcagatgaacaggagcgtatggcgcggcgtacatcccgacggcgccgaccagacaccacccgaaggcatcaccgaccccatggtccacgcccattacggcggcatgtacctgaaaaaccgtctggaaggcgtcaaacagctcaaggccgcgcacccggacatgccattcgccaagctcgacgatctgacggcactggtcatcgcccacaacgccggcgaaggcaacctcatgaaatacccggatatcccaagcatcaccaaacggtacctcgacaacgtcagaccggcgatcgacatgggaggcggctgttcggccacggcaggacgaaccatcggcaagctcgcgccgccgttggccatgcagcccggcacgttgaatgtggacgtggcggcgaccggcacgcccgtgggcaggatcaccacctatgcgaccggccaatgcacatggtgggcggccgcccgccgactgcagatcggcaaaccagtggacggctacatgggtgacggctggatgtgggcgtcaagcgcccggaaactcggatacccgaccggcggcgacatacagctcggcgacgtggccagcttcaccaaaggctatctcggcgcaagcaccgactacgggcacgtcgccatcgtcgaggaaatcaaagacaacggcagcatcgtcatcagcgaatccggcggaggcatcccgtacgcatggctcaggaccctcaccaaggaacaggccaacaatcccaacatcacctacatacactgaccccgacggaaaagaaggaaacatgcgccgcatcaatcccaggctcgatccttacgaactttccgacctcatgagcgaccccggcaactgggaccttcttacccagatccacgaccatcccggcacatggccggaactcgaccaatgggccgcgcacgccatcgaggacccgggaacggccggagcgccgccggaaccaccagccggaacgagacccggacgccggttccggcccatcgcacccgttctcgacgacaggccggcacgagccacgcgaaacgagaagaccaagacacacacgcccgtcacgcataggcgggaggaaccggcaacagccccgaaacccagggaaaccggtggccagacagccgacgacgccatcacaccggaggaaatggcgcccggggaatcggacgaggtccccgtacgccgacgcatcccccttgtccgcatcatcggcatcacgcttacattggccgtcatcatcgggtcggccgcgggtctggctgcgatgatgagcatccgggaccatcaggcggcgctcacgtcatgcaatcaagcaatcaagcagtcggacacgatacgaacggactggggcaaggtattggaacaggccgaaccatacctgagactcggcgacggggatgtgcaggatcccaagaccctggaactggtcgccgcgatcacgcgataccggctcccggaaccgccggccgcctgcgatccggacatgacgacgaaccagctcgaccaccggcggacgtccatggaaaaaacgaacggccaaatccaggcccgcaccaaggacctgcgcgacgccgtcggcaaggccaaagcctcacgcgaacgcaagcagctcgccgacgcgcgggagaaactgaaccaggtcatcgaacaggccgacacgctctacaaggattccgcggacaggaccgacgacgcccggccacgcatcgatctcggagccgaactcgaccacgcccgacacacggcgcacgagaacaataacccctccacactggaacaggccgccgaaaggctcaccgacgccatgcgacgggtcaacgagtcgatgcaaaggaaaacggaggcggacgccgccggacaacgcccctcaccaagtacgggtgccccggaccatgggggcgcgcaaccgcatgcgggcgatgcggatgccggcgaacccggccaatccgggaacggattcccgccacagcacaagccgtcgtgggatacgaatcagggggattccccgatcttcccggacgaattacgttttgagcagagatgaggagcggatatgttcgctgtagggggctggttcgtcttgttcgtaggtgaggaatgggatagcgtcgcaaatcctgatgtgcagaccggtgaaaatgtcggatatttctgctgtagtacatcgctcgacgcgacagcacggggtgtcggatgcgttttccatggaagctggcataggacatgtcaggcaatggcatagatatgacaaaatagatattagagagatatatacatatacccgctgtagtgtacgtcatctgcaatgatgaaacattcgctctcttcggcttgcatggtagcattgcgggcaatggtgatgatgttcatgcgaaaggtagcatatgaatgataatcagattgactggcgtgagaccgtagagacactccttgcccgctcgaaacggtcattcgtgccgattgacaaatccttcgtgcagcttccacgtggcaacgaagagcgcaacagcgtgcttgcccggttcatcaggaacggagatttgcgcggtctcaaggcgtatctgctgatagcggcatcgaccagcagcagcgatgagaacggggaatggtacaccacactgccattgcagacctgggcaagggcgttcggatgctttcagcatgccggaatcgattcaggaaaagctgcagccacgaagatactctcccgcctgcagcaacggaaactaatcaagcgggaacgatcaggctccggccgcgaggtcaaggtgcgtcttctgtcccaggatgggtctggcggaccctatcagaggcctcggcaacggtttctgcgcctgtcatatgagttctggcgcaccggtctcgacgaggaaatcagtcttcccgcattggccatgctactggttgtactgggagagaaatcctactgccggctaccttctgagcgcatgcccgaatggtacgggtggtcggctgacacagccgaaagagggctgcatgagttggtcgaacgcgggttggtcagcagaatatcagaaagtatttccacgccattgagccccacagggttctccaaggtgaacacctacacggtgctaccgccgttcgatcgggaatcgctgaactcgtcccgcagaagaagagacatgacggaggtgaaagccaatgagtaatctagtcgcttggggcgatgaaagcgtcagaacgcagggacaagacgttcccgcatactacatgggtgtctgcatctgcaatctggaggaagttgatgtacatcggatgctgaccacggtcaccaaaagacacgtgcccaaacttcactggcgcgacatgacaccttcggagaaacgcaaatccataccgattatcgaacgactcgcattgtcgcacatcgtggtggcggccataccactcgacgggtcggtgagttcggagcgggccaggagaaaatgtctggaactgctgctgcccgtcttggaatacgagtatggggtgaaccgtcttgtcttggaggcgcgcgaatcccatcaggacgacagggatctcgactttgccagggggattcgcagccgacacatcatcgagacgttgcgtgtagatttcaagcccggcaatgaggacgctcgtctatggatcccggatcaggtccttggcgcactcggggatacacgcaacggtacgatggatttcagcccgatggtcgcatccttggattttcggaccgtggatcttcgcacaagctgactcttcccgaaacgaatcagatatcactggtcgttggtgaacgatatagtatgagataagccagcctctgaggaggaaatggaagtaggagccggattccctgtgcatcatgggggccggctcctgcgctatcgattgcgagccacaggaagctctggatggccagagatttcaggcctataggaacttttgtggtgctttagactggttttcgttgtcagtcggtggtgttggggtatcgcgtggtggtgtggaattcgttccagtcgatgccggtcccgtatgcgggcgcgacgctgtcgtccggttcgggcgtcgttgccttttcgcccttccgcagggcgtcggggatgaatgactccggtcgtgggtgcgcggtcttcatgtagcatacccattcgcacgcgcggcgcatgtgctcctcgggcagcccgcgatggttgcgcaatacgtccttgaggcctataggaacttttgtggtgctttagactggttttcgttgtcagtcggtggtattggggtatcgcgtggtggtgtggaattcgttccagtcgatgccggtcccgtatgcgggcgcgacgctgtcgtccggttcgggcgtcgttgccttttcgcccttccgcagggcgtcggggatgaatgactccggtcgtgggtgcgcggtcttcatgtagcatacccattcgcacgcgcggcgcatgtgctcctcgggcagcccgcgatggttgcgcaatacgtccttgacgaccgagttgacgccgccctccagccggttcgtggtgcgcgccaccggaccgcccttcagcagttccggctcgagataggcgaacagcctgccctcgcggaacagcctctccagccgccggtagcagcgtcgcagctcctcgtgcgtccaccaccaccggcgcctcgacgccttggggttggacgggtcgtcgcgcgcgtaggtgcgttcggcgatgaagtccttccaccgttcgtgccatgcgttgagggcctcgccccacctgacggcctgcccggccgtctcgaccgaggtgagcccgtcggacagcctcttcagctcgcggccggcctggagcctgggcctggacgtcaggtccgtcctcgtgttgcgctgcacgtgcaccaggcagcgctggatcctcgttcccggccacgcctgcgtgcacgccgcctccgcgccgcgcagcccgtcggcgatgagcacgtccggcgcgggaagccgggagaacagggtcaggtatgcggccttggactcgtgcgcgcaccactgccagtccagcacctcgccggtttgcccgtcgatggcgatgatcaggcaccagccgtggcccatgtacgtgccgtccgccatgaccgtgtggcgcctggcgtccggcggggcgatgcgcgggcggatgcgccagcaccatgcgattcgtttgcgcagggcgcgggcgtcgcccgcggagtccgccgccctttgggatgacggccccagcagccaggaaaggaactcctccagcgtccgctcccgcctgcgccgccgctgcggcatcgtcgagctcaaccggcaggccgggcatttccaccgctggacgcccttgccggtccgcccgttcttcttcatcgcacgcccgcacacggggcatctcttcgctttgctggatggcgttctcacgccatccagcccaccaccgggggcgcatcattttccacgcgacaaaaatgacaggccgacacgcctgctcccacaaggccgggccacggttataagcaccacaaaagttcctataggcccgaacctgtcatgctattagtgcaccggttctgtcgtagcgagccagcacggttccccatttactccgtggaggctttgactgataactttcatgagaatgactgattctcggcatgataatctccctcgatggcgcaaggcgcaccctgtgtgcaccttgtgtggggagattgaaactgaaagacgctgtaagtggatacgcttaaagaactatgttcgcatttgtcatctagagatgacaatatattcatatcttgagtgtattttcattgaatgccattttttgataattgacctattgagttgagtgtgcggaagccttcagtaatgtgcttattctgttatgccttattcactgtgccgctttgatgaagtcttcggcgagttggttgacggcctagttgcggtgccgggcaacgatgcgctgatagtgcctgatggagacctcctcactgacgcggccaagttcgttcatgacctccctcagagtgtcgcccttaagcatgagtatgagtcgtctcatgccttctgctggtatgttagacattgggtatgtagcactgttcgcatacagagagggcatacgaacaaagattggcagcgttagagatgtcaggagccgtggtggttttgtcatctttagatgacaaaaccaccaatgatagagtcttcgaatatacatcaatgctttaattaaattgggataagattccccaaacaataatcaaaggagattatcatgaaatactttaggtgcatactgagcagcattattgcaatctttttgtgcatgtcagctttcacaggaaccgcaacagctgtcgagaacaattcaccccctattgacgtgacaacatgtcaaactaatcctattgaattgactgacgagcagcaagacactttaaataaaatcgtatctgttggcacacattttaaatatgtggacaatcagttgattattaccttgaatgagagcgagcttaagaatacatacggtttttcggaatctcaatatacattcttgcaagataccgtcctaggagctactcatgctgataacacttcgtttgcaagggttcctgcctctccatccggagcgatggcgaaatgcgatggatggtatatttcccactcggatcttactgtaggcattgctaccgccgtaaccgtcgcggccggcataggccccgaggcgctggcagcggccttgactgcgttggggaccacggtcggaggacctgctggaacaattgccggcatacttgtttctgcggtagggactctataccttgcgaatctcgctctgcaaatcacccgcgctatagccaccggaaagggaatctgtctcacgatagccattccacccggagtcagtgttcaatagaaggagcattgtgaaatgttctcgcaaaatatgctgatagcacccgaggcattgtttacaggtgcgtgtatatgctggttcggtaattttgcagtctcagacacccccgaccctacaggaagatcactcctcctatggttgaatggtgcaattatggtcggcgcgtttatttgggcgataatacagtcaattcaaatcaacgataagtatccctatcgttggattaggtccacaatatattgtggccttatccttctcgcgctgattatctgcaataccaactggactcgatctgcagcattagttgcacttattttatatagtattgtaagcatacgtaaattacgaaataatgagattacgaaggagaataaataaaagaacattataaaagaccgtcagtgaaatactgacattaaatcgaatccaatatgactaagatttgttggatggccttctaaaataaggccatccacaatgagaaacagagaagtcttagatatttcgaatttagtaatgtaattacgacatgaacaaaatacatattgcatcgtcgccagtcatatatttttagtgtattttgcttactaatagtattctaaacagaatcactattgcttcattcatgctcttcatatacgacagctgctttgataaagtcttcggcaagttgattgatgacctggctgcgatgctgggcgacgatacgctggtagtgcttgatagcgactttctcgctaacgtggccaagttcgtccataacttccctcagagtgcctcccttgagcatgagcagcgtcgcgtggctcgctctcagtgattggaaggtcagatcggtacgtccggccttctccctagctttgcggaactggccttccagggtggtctggctcatcaccacagcacgtttaggccgaaacaccatagcttcagagtccgtccattcgcaatgcttgagcaaatgatcatggatcaggggaataagtccgtcagggatgggaacagtgcgtcggctggagtcggtcttggtcttagctatgcgcgtcgagccgcgatccgaatatcctctgttgacggagtggcgcacggtcaggcgtttggctttcagatcgatgtccttgacctgcaagccgcacagctcgccgcaacggaggcctccgacgagcgtggcgagtactactgtcagtcttgtgtagtcgggcatattctccgctatcagactgagttcgagaggtgtaacaggcggaacgtcctctctggcggaacgcggtgctggcggtatgggcaggatgaacgggttgtctcggatcaacggcggagagccgtccatactcatctttgtggcgctggtgaacgccgctttcagtcgcatgcatgatcggcggaatgcccattgtccctcagggtgcggcgcgtcataccagcgtttgatgtccttcggtgtgatctcggccagaattttgcccttgaagcccggcatgaaatgcgcaatatcgagattcagattgcggagcgtacctccggctatcctctcaccgttcggcaaacggtattcctccgcccactgggtcacgtaatcctcgaacgagataaggctcgtgcgcttcctgcgacggcgttcggacgggtgaacccattcctggatgttcttgcggtccagttcgaccaggtgtcgctcctcttcgagccactggtgcgcttcgtgctccatatccggtttgaactgacgctggacctttttgcccggacgcttcgggtccgggtatcgcacctgccaagcgacaagatcgcccgacgcatcataacgcggcgtcacggtgccgaacttgctccggcgctccaacgacggccctgtactacctttcttcgtccttacaggcatggtaaaactccttgctaaatccgaaatcgatggcacaatgtagccgcttcaaaaaatgccatcaaaaatgccaccaagtagcctgaataggctctctacgggccgctgcacctaaaaatgcacctatgccacctgaggccttgcaatcattggtttttaggctgattcaatcactcattacaggccgtttcggccgccagtcgcatgaagatgacaacaaggagcaacactgctcgcatatctaccggcaagaaccggaaaccgttggtattattgacttcgcaattggtaaagaggtacaggcatgctttcggagcgatggatttcggcccatgttccatgggaccgtatccccctctctgggggtacttcactaaagaccccggtcatagcgaccgaggtcttttcgtattcgcgggaccaggtctgaaagcattcggcccgcttgatatgtgctcatggtttcatctcagcacgtgttcgcgcccgccacaaggactatcccaccgtagacgatgtgacatcctccacactgtgacttcgcgcacagggtcccgacgccaccctcaccccgtttatcgacaccatgcgtgtataaccgcatatggcatcatcggcgaacatcggccggcagaccagttgtacaaggagaacatcatccacatggcagacaccgccaacaccaacaccaacgcctggctgccggcgctcaaagcggcgtttccgctgaccataccgatttgcctggggttcctgtttctcggcgcctcgtatggcattctcatgggcaccaaaggcttctccttcgtatggccgatgtgtatgagcgcgttcatcttcgccggttcaatggaattcgtcacggtgaatctgctgctctccgcgttcaacccgctcgccggctttctgctggccctgatggtcaacgcccgtcacctgttttatggactatccatgctcggcaaattcaaagggctcggctggaagcgcccatacctgattttcggtatgtgcgacgagacttttgccatcaactccaccgcgaaaatccccgccggcatcgaccgtggctggttctacttctgggttacgctgtgcaatcagctgtattgggtgaccggcgccacactgggcgggctgatcggcgcgcatctgccgttcaataccgacggtcttgatttcgtactgaccgcgctgtttctggtgatcttcctcgatcagtggctcgacggcaagcatcgcgagcgactgtccgccgtcatcggtgtgctgacatcactggcctgcctgctgatattcggggccaatgatttcatgattccctcaatgatcgccatgctgatactgttcgtcgcgctacgcccgcatctggacgtgttgcggccggccgccgacgccccggaagccacggcagaccatgccatgagccacgcagcggaccagcagaaggaaggacagacgcgatgacgatgaccatctggcaaggcgcaatcactatcgtgacggtggtgctgggcacgatgtgcacccgttttctgccgtttctggtgtttcccgagtccaagcagccgccgcgcatcatcgagtatttcggccaggtcctgccctatgcgatgaccggtctactggtggtatacgcactgcgcaacaccccgattctgaccggttcacacggccttccggaactcatcgcctgcaccgtcatcgtgctgctgcacgtatggaaacgcaatatgctgctttcaatcgccggcggcacaattgtatatatgttgctggtgcaactggtgttctgaggcacccgactcgttagtctctccctccgcttcgctatgctcagcacctcccttacagagggaggtaatcttctgtaccttcctctgacgagggaggcggcaccgcgaagcggtgacggaggtagagacccgcagtcgtaagactgcgaaacacacagcatcggccacaggccgattcctacagctgcttcgccacccaatcgacgatgtacggggcgacttcctcaatctggtcgatggcgacctcgaactcgtgcttgccgccgtaccacgggtccaccagatcgatctgatcttcgcggccgggcttcggcttgggcagattcgggtcgaagctgcggtacatgtgcacttcggcgcgcttgccggccggcagcatgcgcagcagggcgcgcatgtgggaggcggtcatcggcaggaacaggtcggtacggtcgatttcctcacgcgagatgcggtgtgcgaagtggtcacgcggaatctcatcaccatagccacgttcgcgtagcacgcgcacggcacgcgggtcgatcgggtggctccactcctcgtcggacacaccgctggattccacgttcacctggtcgccaagaccgcgctcattaaagaagtgacgcagaatgatctcacccataggcgaacggcagatattgccggtgcagacggtcattacggtgtagggctgggtattgctcatagctttgaatcaatcctcaatcgggcttcaccgggccgcacacggcccgactgtattgttggggtcgaatgaatatgaatccggctcatgccgctataaagggcataagccggattcgcatgcttacttggttttggccaagatacggaaacgataggaatcgatgccggactcctccttggcgggcgtatgccactcgcccacttcggcttcccgccacatcccggcctcgaccagcgacgccatatcgggcgcgtagctgtcggcatccacggtggcggccaaatcagtcacataggctttgtccgcgaacggcaaagccttggcgaacaactgggcgccgccgatgatccaaatctccgaacggtccagaccgtcgtccggaatcgcctcctgacgggccatatcgagcgcgtcgtcaagactggtgaccacagtggcccccggcgcacggtacatcggatcgtgggaaacgacgatgttgtcgcggttgggcagcggccggtacttgccccccagcgattcccaggtcttacgacccataatcaccggatgggagacggtcagctccttgaaatgcttcatatcctcggcacagtgccaaggcatgccaccattgaggccgatggcaccggcgcgaccttccttgtcacgggcttcggcccagataagattcaccgagaaggtcttgggataatcgtcaccccagtcttcttcagtggcagacagcccggcagatccgggctcgggttcgtgatagccgctacggctactgtcatgctccatttcgcttactcctcctggattgcggaactgggccttagtgtagtggacagcgaagactcgggggccgtcaccttcacagtattcgctgtccacgaaacggtaatcagcatcagaccgcaacaggtgccttaatagtggggtgatgctggtagccgacgaccttgaagtcctcatactggtagtcgaacagggaatcggccttacggatctcgatggtcgggtacgggtagggcttgcggcccagctgctcaaggaactggtcgacgtggttgtcataaacatggcagtcgccgccggtccagacgaattcgcccggcttgagcccggcctgctgcgccatcatcatggtgagcagcgagtaggaggcgatattgaacggcacgccgaggaacatgtcgcaggaacgctggtacagctggcagcttagcttgccgtcggccacgtagaactggaagagcgcgtggcagggcggcaacgccatcttctccacctcggccggattccacgcggagacgatcatgcggcgcgaatccggatgatgcttgatgaggtcgagcacattggagatctggtcgatggtgcgattcgggtcctcgggggtcggcgcgggccaggaacgccactgcacgccatagaccgggcccagatcgccgttctcgtccgcccactcatcccaaatatgcacgttgtgctccagcagccacttgatgttggaggaacccttcaaaaaccacagcagctcataggccaggcctttgaagaacacggtcttggtggtcagcaacgggaagtacttcgacaggtcaaagcgcatctgctggccgaacagggaaatcgtgccggtgccggtgcgatcggacttcagcgtgccttcggtcaggatcttgcgcaccaggtcctcatagggcatcggaatgtccgtttcgggacgtgcggggatacgggagcgaatatctgcgagttgttcttcggtcaaagccatgtgcaccagtgtagcttagggggcataatagagaagtccactgatgcgggagagcggccaggtgccgcgctcccccgctggcatggcgatgggccagatcgccggcggctgaaaataaaggagcagctatgggtaagcgactgtgggttgagcgtaacaaggacggttcgtgggatgcgttcagcgacgatggcgcacacattaagttcggcaaggatcgtggccagttcacgccgggcgatctgatgaaggtcgcgctggccggttgcgccgcgctgtccagccagttcgccatcgaacatacgctgggtgagggcaagggtgccaagattgtggtggatggcacgtacgacccggaaaatgacgcctacaccggtttcgaggagcaggtggtgattgatgcttccgacgccggtctgtccgaggaggatgccgacaagctcaaggagcgcgtcacccgccatatcgacaagggttgcacggtcaagcacacctacgtgcaggagaccccggtgcgcatgaacgtcaccgtcaagcactgagacgggatataaattgaagaggctccctggcgggagcctctttccgtatattcggactttactggcgatcgggatcgatggtcttttcgatctgctgggcgacttcaggctcggctgcggacaccggaatctcctcgacgccggcaatctcctccagcgacttggtaggcacttcggcgggcgagctcggcacggtgtcgagacgcgattccgcggcctcaacatacttgcgtggcaccacgtacaccgggccgaccgcatgctgcagcaggccctggctggtggagcccagcagcaagccagtgaagccgccgcgaccacgggagccgacaacaaccacatcgtgatcgtagctggccttggtcagggcgctcacggccgggccggaaacgatctgcttgttgatcttcagatcaggatgcgattcctgcaacggcttgatgcgcacctcaagatcgtccttgtaggactccatgacggcgtcctcgccgtccacacccttcaggttcggcacagcggaaatcacgtccagttccgcaccccagcacgtggcgaagtcggcggcaatgtccagcgccttcagaccccacttggattcgtcggagccgacggccaccttggtgatcgtgttgttcaggtgcatcaggttaccgtcatcatcggtgtacggcaccaccacaatcgggcagtaagcatatgccggcagcgatgaggacgtagtgcccagcaggcgctcggccagaccgcccttgccacggttgccaatgacgatcagattgtagttacgagacaattcgacgaacaccgatgccggatctccggtaacaatcagtgtggcggcttcgacgccctgctcgtctgcgatggccttggccttggacagaatctcctgagcatcggaatgcgcggcgttatcgtcccccatcgccgtgtaagtggcatcgaacgaaacggcggcatagctcggcagggaatatgcgcagacaatctgcagcgtcagccccgcgtgctttgcataattcgcggcccaccatgttgccttgtaactggcatgcgacccgtcaacgccgacgagaatagccttgtcgttaatcatgacgacctccttgaagttattgcggcacgaataccgcgtatctcaacaataccccgcgacactcggtttggccggtatcctccgctcaaaaagaaatccgcgtatacgaaaaaggcacaccccaaaggacgtgccttaatacgaattcgcttaccgcataattcttgtcacatcacgcggcgaatggaatatccagctccaccgaatacggaaacgtcgcttactgccgttccctgcaccgggttcatagcattcatcacctgtccgttaccgatgtaaatggccgcatgagtaccattcgcaagaatgtcacccggcttggcatccgccaagcttgcgaccggagtacccacggtggcttgagcaccagaggtacgaggcagggagatgccaaactgggagaagacgtactgcacaaaaccggagcaatcccatcctgccggagtgttgccgccggcaacatacggatagccttggaacttcagtgagaagctagcaagctcagcgccagtgccagtgccagtcattttacccaagtcaacctgtggaatcgacgcacgctgttcagagcggctggctgccgcagcagcagcggactgggctgcagcagcttcatcagcggctttctgagccgccgccgctgcagcagcttccttctcgccctgagactcggtctgtggcacatcaagagtctcgatgccaccccatttagagttctcatcaaccgaggtggaggtggattcggcgaacaaattcttcttcaccgaactcgccttcgggaaagaacgtgaggacaccacagcactcgtctgcgcggaatcggcagaggcaaacggggctacgcacgcaaacatggcacccgtggcgataatcgccactgatgtggaaataatagtcttaacgctcatcatcaacgccatacactagcacacatgggtcgatttcataacaggaataacatttcgaagatgatgtcgcgggtgcatcattcggcaggagaacgcaacaggcctcggataccgatcggcatccgaggcctgcaataaatcaatcaataagactgcatcacgggatacgcaccacgatggtgagcttttcggtcatggcactagcgagagccacgctatagccattccatccaccatggaccgcctgaccgttgccgacatacaacgccacatgatcgtagtgtgcaccaccgttccatccaccggtgttggcataaatcagaatatcgcccggctgcagggatccgtctgtgactacgtggccaccaggaacattgacgtactcttcaggccaaccgtggaagttaatgccacgggccgccaacgcttgactgaccaatgcggtgcagtccatgctctgtccgatcaaagaatacgcacggtcgatagaggcaccggcaccagcggaaaccgaaccactggcatcggaataagtaacagaagagcgagactcattacggctcgcggcgttggcctgctcctgggtcgcctgagcctcgacctccgcctgcttctcggcctcctcttcggcagccttcttggccgctgcggcatccttttccgcctgagattccgtctgcggcacatcgaggttctcaatgccgccccaatcagcattgtcctcaacgctcgtggcagtggcttcagtcgtcagatctttgcgcacctgggtgtacgaggggaaggacttggtggaagtcacagtaacaccctcagctgcagttgctgtaggaacaaacataaacaagcaggcacaggagacaatcgcggcaacaatggaagaagctacagttttggtcttcatagaaccatcaccctacacggtgcgcattaactcgtacaggatggaagaaataaaacaccccggagctattgggatatatcggcgtgtcggcacaggtcagttcggactaatacgcggccgcaacacttgaaatgtcatttcgcgcgaacgattgccgatagggcgacgtcacatccgaacagtaatcaccgaatgtaagccaatgaaatgaatcagtagtgaacgtactggaacttaccggcttcggcggcgctgaacgtacgggtcgaaatcacacccaatcccttggcattggattcggagatctcaatggagccgtcggcattgatcttttccagaacggcaacatggccgtacgcgccatcggcatcggcctggccaggagcgaacaccacagcatcaccgacatggcgaggagtgttgtccacccaatagcccagagcggaagctgacgccgcccacgcgccaccattgccgaagttgccgctggaaggcaggcccagttcggcacgacgctggtacgcgtaccacgtgcactgaccccacggatagttgttggagttggtgccaacggcatggtttgggttgaagccagccggcacagcatcgccatcggcatccacgagagccgacaccacaggattgttcgcattattgcgattcatcagcttggcgtccaaggtgctgtctgaattgctcagcccccagccgccttcattggtggactgtgcggtaacggaggatgaactcaaatcagtacgcgcttcggaacgagaagccgcagtcacatcgctgatgcgcttaatctgcgtggtcgtcgtggccggatcagccacgaacgagttcgtggcgtcttcattgttggaaaacgcgagagcacctgcggccgtgccgaccagagcggccagtgaggccgaggcaagaatatggctacggcgttcagcggcacgagcggcctcacgaatggaacggcgggtctggggagcgatttcgttgatcttctcggcaatggccggatcaagccccaaaacaacggcgtcgctaccagcggattgcaccgcacgcacagcacgaacggaatgagaacccttgccggaggcaaacaatgccttcgctaagctgaacttctggcgcgagaccgtggtcgctttatgcgaagcatgcttcatactacgttaactccttggatgggttcggcggggtcatttcgatgacctcgtatgaccgtcacaattgagtactgtacaacgaacagaggtcaatcctcaatgtgatcccccaccatccgggtgtgtcaaacgatttacgtaaccgtgcggccgggtgaaaaactgccttgtttccgcccgttcacgaacctcactatccggttatcggaagaatcactaactcatgtcattccgacacaccgtagccatgatgtgctgcgtacattctgcactgcattccgcattgccaccactgccgcccggcaccccggaattccgcagtagccccgcagtaatcccgtacaccgagcattatccgcgatattccccaacactggtctacccttgaaaccatgactatcacactgagtattcccgagtcgctgaagcccgaagatggtcgcttcggctccggccccagcaaaatccgccccgaacagatcgccgcgctcgatgccggcgccaccaccctgcttggcacatcacatcgccaggcaccagtcaagcaactggtcgcttcgattcgtgaaggtctgcgcgagttcttccacctgcctgaagggtatgaggtggcgcttggcaacggtggcgccagcgcgttctgggagattgcctgcgcttcgctgatcacccgtcgcgccgcattcggcacgtatggctcgttcagtgccaagttcgccgcgtccgccgcgaacgcacccttccttgaagacccggtactgttccccggcgagccgggcacttaccgtctgcctgagctcaccgagggcgtggacacatattgctgggctcacaacgagacctccactggtgtggccgccccgattcgccgcgtggccggaagtcgtgaagctggtgccttgaccgtcatcgacggcaccagcgcagccggcgctttgcctgtggacatcagccagaccgacgtctactacttctcaccgcagaaggccttcggtgccgatggcggtctgtgggtcgccatcctctcccccgaagctatcgatcgtgcggcaggcgtcgaatcaagcgctcatctggaaggcgcacatcgctgggtgccgccgttcctctcgctgaccacggcactgaacaactcccgcaaggatcagaccctgaatacgcccgccgtggccaccctgatcatgatggaaaaccagattcgctggctcaacaacaacggcggcctcgcctgggccaccacacgttgcgccaagtccgcatccaccctgtactcgtgggccgagcgctccgaatacgccgctccgttcgtcgtcgatgcggacgcacgctcgaacgccgtggtcaccattgatctggacgaacgagtccaggcctctcaggtactgtccatcctgcgcgagaacggcattgtggacgccgccggctaccgcaagctgggccgcaaccagctgcgcgttggcgtgttcccctcggtggaaccggctgatgtcatggccttcaccaagtgcgtcgactacgtggtcgagcacctgtgatggcacctatgccttgcatggccgaccatatatgccatgcacattgatcggtctcaactgatgccgattgaataaatcgtagggagggatgtttgacgcccctccctactcttactacagtgcatgagtatgaagttcgcgcctctcattgaccctgccgtccgcaaacccgcacccaagcccgtacgggtggacctgcgtaaggtgtttgccatcggtaccggtctatggattgtggcgttgatcgtcgtgctgattctgctggccgtgggctacagcgtaatgccgttggtgattatgtgcgtggccggtgtcattattggcttgctactgctggtctgggaatacttcgaccgctgggactaccgccgcctcggacagtaacgcaacacaagctccctctgatgacgggagctgtcagcgtagctgattgagggagagaccgcggccgcaggtcgctcatcaaacagcattggtggcatgcaaggcatgccaccaattccttacctcactgcgccaacggcaacgtaaggctgaacgtactgccttgcccgggcgcgctccatacggtcacatcgccatgatgggtcagcgccacatgcttgacgatggccaagcctaggcccacgccatccgccgtgcgattgctctgttccacgccccggtagaaccgctcgaagatgcgcgcctggtccttcttagcgatgcccgtgccttggtcaatcacgcgaatcaccgcgcggtcgccatccttgtctttggatgcggacacgctgaccacgccattttccttggaatagccgatggcgttttcgatgagcttggtcacggcgctgtcgatctggtccgcctcaccattgatgactagatcatcgtcgcccttgatgttcagctgcacgccagcctcggctgcctgcggctccagtcgcgccgccgtggccctgagctgttccataacgttcagtcggttggcggaagacggcgtaatcggctcctgcgcgcgtatgagcagcagcaaatcagacaccatgtggttgagcttgctgcagctggaacgcacctggcgagcgtcggcagccacctgctgttcgtccagattgccggactccagcgaatcggcgagtttggccagagcctcagtggggcccaacaattgctcggacacattggtaataaacgagtcacgcacttgagcgaaacgaatcacgtcactgacatcggtaatcaacacgatgacgaactgctcgttgatacgccctacagtcaccttcagccagttggggcggtggacggactgcgtggcgacgtgatcgcccttgttctggtctgcgacgtaccgctccggagtatcggtggtcaagtcgaactggcgcttgccaccggacttgcgcgcctcgtgaatggcatccagcacctgctgctgggcaatggcgtcatctgacaccacacccaggcggtaggcggcgggattgcagcggaccacctcgtcgtgctcgtcgaccaccacggacgcacctggcagcatggacagcagcgtggcggtgtcgtcggacagatcgtcattgtcgtcatcatcggccagcggcgattccatggacactcgatgtgtcgcaaatcccacgatgagcgtgatgattcctaccacaaataaaacagccgtgacaataagagcaatcgcggcgacgagcggcatccgtgtcatgcccccattctttcacaccacacgccgggattgcggtttgccggcacgccggtaacatgaatttcaggtgaacaacccaatgaacagtagaacaacttgaggttgccattacctacgttgaagtggggaacaagtactggaataatacactggtacaggttgcaataagcaagcatgaaaggctagagaaatgcgcgttattttcaacgaggagctgaagcaggttgctgacgacctcgaccgtatggcgcagaacgtacgcaaggcgatcaaaggagctggggaagccctgctgaatcaggacgttgaagccgcacagactgtgattgacggcgacatcgaaatcgatgccctggagtcctctgtgatcgaccagtgcgtcaagctgctcgccaagcagaacccggtggccaccgatctgcgtgtggtcgtttccaccatgcgtctggcttccacgttcgagcgtatgggcgatcttgcccgccacgtggccgaggccgctcgccgcacctacccggccgccgcgattcccgaatccgctcaaccggtgttcgccgagatgatcgacttcctggacaacaccgctgaccagctggtggccatgctctccgatcgcgatgccaagaccgccgaggccatcatcctggccgacgacaagctggacaacctgcaccaccagaccttcgatctggcgctgtccgatgacatcacccgtcagcagaccgtggatatcgtgctgctgggccgcttcctggagcgtctcggcgatcacgccgtgtccgccgcccgccgtgtggtgtacatcgtctccggcttcgaccccactaaggagccgacccgcgacgagggcaccgacatcgactgattgggacttgttctcacattgggcgaataactgaacacttgttctcctgtggtttgaggaggatgcccgaaagcggcgatccggctacggctggacgccgttttttgttgcttttgggcgatacaccggcgtatccatggggcggcaaaacacccatagggcggtaacttgcccatggggcggtttgaaggatatgtgaaaccgcggaattaagccattctggcaccccggtccgcccctggggttttaccgccccatgagggttttaccgccccatggggtaatcaccgccccatgggggatttggcaggcatagcaaaggggagccgcacgttatgtgcgactccccttacagcttgtaccgtgttagcggcttaggctcacttctggccctgagcggcgacagcggcggcaccggcagcagcagcctccgggtccaggtactcgccacgcggcttgatcggcttgaagttctcgtccagctcgtagagcagcgggatggcggtcgggatgttgaccttggcgatctcttcctcagacaggttgtccagcatcttgacgatggcgcggagggagttgccgtgggcagcaatcagcacggtcttgccggccttgagctccggctcgatagcggactcgaagtacggcttcacacgctcaacaacgttggccaggcactcggcttccggaaccggatcgccggcgtagcgcgggtcgttgttctgggcgtactggtcgttcgggtcgatctcgggcggcggggtggcgtaagaacggcgccacagcatgaacttctcgtcgccgtactcttcgcggatctcggtcttgttcttgccctgcagagcgccgtagtgacgctcgttgagacgccagtcacgctgaaccggaatccacagacgatctgcggcatccagagcgatgttggcggtgttgatggcgcgacgcagcagggaggtgaacacgatgtccggaaggacgttcttctccttgagcagctcgccgccacgcttggcttcggcttcaccctgctcggtcagcggtacgtcgacccagccggtgaactggttagttttattccatgcgctctgtccatgacggagcagtactagtttataagtcatacggttcagtctacagccgcgtgcgcccaaacacgagtattcgtcttattatttcgctctcatagcgccacggcaaccgccagcaccaccgcaaacagcaaggtctggaagctggcggcgggcagagccgggcggaattgacgtttattcacgctggagaccatgcgcacaggtattccggtgcccgagagcaacagcaccgcaccccacggccaccataatgtaccgcacatcagcagggcgatgatccatgcgatgacgcagcacacaatcagcaacgtacgcgcgccggactcccccagccgtacggccagcgtgtgtttgccatgctcacgatcctcgtcgatgtcacggatattgttcaccataatgatcaggcaggagaacaggccagccgccacagcacccaatagtccgccgacgtccaccgtgccgcacagcgcgtattcggtgcccaataccgcagccaagccgaagaacaggaacacgccgacttctcccagcccgacgtatccatacggatgcttgccaccggtgtagaaccagccggccagcaaggaggccgcgcccacggccagcaaccaccatgcttgggcgagcacgaccgccacaacaccgcatatgcaggcgatggcggcgcaaatcatcgccgcgaacagtacatgcttggccggtaccagtccggatgcggtcagtcgctggggtttgcctgatttcgattcgtccatgtcacgcccggcgtcagtgccgcggatgccgtcggaatagtcgttcgcatagttgacggcgatttgcaggaacagcgcgactagcaggcacaggatggtcaccggccagaatcggtccatcagcagggtctgctgttcacgggccgtggcgcaggaggccggttctggatatattgcgatgcaggtgcccgaccgctcgatatgcacgtacgccatcaccgccccaaccatcaccgacgcgatggaagtgaccaaggtcttgggacgcgcgccccgaacccataagccgatagacataagcaatccctttcatatataactctggctcccctcagggaggggagccagagtatgcctaatcagccaacgagcggcttgaccagcgggaaggtgatggtctcgcgaatcgtggcaccggtcaaggcgataagcagtcgatcaatgcccatacccataccgccggccggaggcatgcccacgccgagagcctcgaggaagtcctcatcgatgtcgcaggcctcttcgtcgccggcgagtgcgtccttggcctgggccacgaaacgctcacgctgcacgatcgggtcgttgagctcggagtagccggtagccagctcgaagccgcgcacgtagagatcccacttctccaccacgccgggcttggtgcggtggcccttgaccagcggggaggtttcgaccgggaagtcacgcacgaaggtgggctcgtaaagcttgtcctcgtagaagtgctcccacaggtgttcgacgagcttgccatggttctccacgtcgtcgcgctccacgccgagcttgtcggcgatggcgcccaaatgctcaacggaggtgccgggatgctcagggccgccgttcggcacgatttcctcgcccaatgcctcggacagcgaatcgtacatgctgatggtcttccattcgccgccgaagtcgtattcggtgccgtcgagcagggtgaccttgtgcgagccgtagacgtccatggcggtcttctgcacgagctccttgaccagctggccgatggaatcataggtgccataggcctggtaggcctcgaccatggtgaattcgggggcgtgcgtggcgtcgacgccctcattgcggaagtcgcggttgatttcgaacacgcgatcgatgccgccgaccaggcagcgcttgaggaacagttccggggcgatgcgaaggtacaggtcaaggtcgaaggcgttcatgtgcgtggtgaacgggcgggcggccgcgccaccgtgcagggtctgcagcatcggggtttcgacctcgaggaagtcgtggtcgtcaaaggtgcggcgcagggaggccacggccttggagcggttgcgcaccatgttgcggatgttctcgtccgcgatcatgccgatgtacggcttgcgggtgcgggtgtcttcgttcaggtccttgtgcagggccggcagcggctgcagggccttggaggcgatagcccactcagtggcgaatacggacagctcgccggtcttggaggcgatgacgcggcccttgaggtacaggtggtcgccaaggtcgacgagctgcttgaactgcttgagcgagtcggcgccaatctccttcttggagatcatgccctgaatcttggtgccgtcaccggcggacagctgcacgaagcacaggccgcccgcgttgcgcaggaacagcacgcggccagcaatgccgaccatgtcttcggtctcttcgccagcctcgagcttgccgtcatacttggcgcgaaccgcctcgatggtgtcggtgacgtccaagtgcaccgggtagggggcaatgccggcctcaagcatcatcgcgcgcttggccacgcgcatctgcacctgctcggggtgggccagcgggccgaactccttgttggaggggtccacggcttcgtccagcgtggcaccggacttgatcttctcgcggatggtggcgtcctgcttgagcagcatttccgcacgttcgacggtgctcatctgcgggacggccggggtttcattctcagtgttttcggtattttcgacaacttcagccatgattcatcagtgtacgcaaggccggcgattatgagcccggcagaccgcacggccatctgaacacccgctcacatgacgcaaaaccggccctgcacaaggcttgagagacctgtacacatggcgaatccaccatcacgcaacactcgcgacatgccgatttgcattgtccaccaccacaatgtaatatctacatctgttgccaaacgggctgtagcgcagcttggtagcgcgcttcgttcgggacgaagaggccgcgggttcaaatcccgccagcccgacaactggaccggattgttgagaaatcagcaatccggtttttcgtttcctgtcccaacaatcaaaccaagcgatcgaacagcggtaaacaacccgccgcacacagcgacaaaccacatcacggcaagcccccgtatttgttggcggaccaccgtaatatatcgctcgaatcaatcgattgccgcactgtttttgtaagtaatactgaagtaattagaggaaccatgaagaagagtctgcttgcactggcttcgggcgcgttcattctcggtgccgccgagttcgtgatgatgggcattctgccgcaggccgcggccgccaccggcgtggacatccccaccgcaggccattacatttccgcgtatgcgatcggcgtgtgcttcggcacactgattctggtattcggccgcaaggtgccgccgaaggacctcatcatattgtttatggtgattgccttggtgggcaatctggcttccgcattctccgtcaatgccgccatgctggtcgccgcacgattcgtcgccggcctgccgcacggcgcattcttcggcacagccacactcatcgccaagactctggcggaggaaggcaaggaggcgcaggccgtatccgtgatggtcaccggacagaccgtggccaatatgctcggcgtaccggcgggcaccctgatggccgagttcctttcctggcgtcttgccttcggcattttggccgcttgggcggcaatgacgattgtgctggcgtcggcgtggattccgtacgttgcgccgattaaggacgccggcatcgccggtcagttcaaattcctcacccgccgtggcccgtgggtgattttggccgccgtgttcaccggcaatgccggtgtgttctgctggtggagctacgtctccccctggctgcagaaaaccggcggatggtcgtcttccctggtgccgatgctgatgatgcttgccggctttggtatggtcatcggcggtctgcttggaggtcgtctgaccgaccattggaggcatgccggcgcggccgcaataggtcagtccatctcctgcctcggcttgttgctggtgctgatcactccgggcaatcagccgatgaccgctgtactgacgttctggatcgccgtcggattgttctttacttccgctccacagcaattgctgatgaccgaagccggccaaggcggcggcgagctcatcgccggcgcagccgtgcaggtggccttcaacttcggcaatgccatcggctcgattgtcggcggcgcgatgctcaccaccttctcgatgaactatcgctataccggtctgggcggtatgccgctggccctgcttgccgtagggctgctggccttctactcgtggcgctgcgaaaccgataccgacgccattcaccgcatgcgcgaaatcaaggtggactgagaccaagctcacagcaaactccctgacgcgtttgttcacagtattaatagactgaaatcagacacgattcagggaggtctggtggtatggacgaggaagcactgctcaaacaattcgccgcgcaattcgcgcatggtccagacgatgccgacgacaccgatgcggcggccgcagcgcaaggtgccgattccacggcgaaccaggccacggacgatgccgatcaatcgcccgcaacctttgatacccaacaattcctgaacggactggacgcgattttcgatcgccacgcggcagccaccgaagccggtccgtacttggaacaggcgatggtggacgcggaaaacgccggcgacgaggccggactgctcaccgtactcaacgaaacgatgggcttctatcgctcgcagggccggcacaaggagaatcagtggattgtgcagcgggcgctggaactggccgctcgtatgggcttgaccaccggcacatccgaggcgtgggccaccacgctaatcaattgcgccaccgcgatgcgcgcggcccaacaatacgatcaggccgaggatttgtatcatcaggcgcagagtgtctgccggcattcgctggcacccaccgaccgtaggctcgcagcactgcacaacaatctgtcgatgctctacagcgagacgaatcggcccgacaaggcggaactggagttgcgtgaagcgctgcgcattatcgaagcctcgagcgtgaacccggacgcggatatcgacgtggccagctcgcacacgaatctggcgttgaccctgctgaccgaacacaagttggagggtgcgcattggcatgcagccaaggcactggaaatctatcgcaccggccatctggaacattccgcgcattatgcctccgcactggcgggcttcgcgcaggtgtgctttgccgagagacggcatgcggatgcagttactggataccggcatgcgctggccgtgatcgaggaatgttacggcaaggacaccgattactggcgtatcaccgccgacaatctgcggcaggccgaggaagaggcggcgaaggccggggtgacggttgacaatgcgggtgttgccggcgatgcaggcacgccaccccagtccggctcgcggctgccgaacagcccggcacagggcaagaccggtgcgaacgcggcatcttccccatccaccgtttcggtgtcgaccggttctgcgggcgcggccgaggccgtttccgcatgcccggtgtccggactgaagctggcccgcgcgttctggacgcagatgggcaagccgatgattgcggcgaagtatccgcagtatgccgggcgtatcgccgccggtctggtgggtcatggctcggaatgctacggattcgatgatgcgtattcgcaggaccacgatttcggcccgcgcttctgcctgtggcttacggatgaggattacgcggcgatcggcgagcaacttgaggtcgattacgaggcactgccgcgcaagttcagcgtggatgcgcaaggccgcgtgacgttcgaggcgcatgccaggtccgatgcttccggagcattcccctccgcaggtgcaggctccaccgtcatacccgatgcggcaaacgcacccacccccggcaccgctacgcacgataccgccactgccgagtcaggcgcggcgtcctctgatgtggcggaagcgatgacgactccgattgatgcaccgctctcccccgtcacgccgcgcgcacagggcgcgaatcgccgtgacggcgtgttccgcatcggtgacttctttgagtcgatcaccgggtatcacactgcgccggcgcagaccgcgccgcatgagtggctaatgcttcaggaatcgaccttggccgccgccaccaatggcgaggtgttcgccgatcccaccggtctgttttccaagacgcgccaagggttcaagaacatgcccgacgatgtgcggctcgcgctgatctccaagcgactcggcatgatcgcccaggccggtcaatataatctgccgcgttcgttgaagcgcggcgacggcgcggccgcatggctgtccatccacgagttcgtgcaggccaccgcctcgttggtgttcctggttaacgtgccgatggtggtgggctatatgccgtattacaagtggcagttcgcagcattgcgcaagctgtctggctcgatgttcgcgctgttgccgaacgtgggcgaacagttggaaaccgtgatgcgattgagttcggcagcctgctatggcggggccggatttggcgaaggcggcaagggcgcggctccagcaatcgagaaaatcaacgatattgtggagcagattgcggtggatatcgtcaaggaactcaaacgcgaacacctgaccacgtccggcgagaccttcctcgaatggcagcgcccgtatgtcgaggaccacatcgcctctgatgatccggtgcttaaaagtttgtagattcaagctccctctgccacggcttcgccgtgccacctccctcatcagagggaggtatcagtgaaaggaacgtcgatgaccaacgaactgactgatgatgaactgcgcgaggctattgtgcgtcatgaatgggatcagttccagcgcaccaacaatgagggtggacgcgcggcatgccaaggcaactggccggtgttccaccagatgcggttggcccagttcctcacatgggagcggccattactcaccagctatgccgctgatcttgacgcggccgaccacgtgggccgcaacctcgtaaccgaaaaatacggccgcatgatggcctccaccgcaccggaaaatttcacgaagaacatagagccgtatattccgcgtctctctgaagagcgcgcggcccgtcaggaacaggtcatcgcccagcaggtcgcctgggccaaggatttccgcgagcgctaccccaagctcggcgaggcgatgcgcgcactcaccaccaccgaagacacaccatctgccacctcattcgaaacctatctgcgcggcgagcttggtacgtattccgaccagaccttcgaacgttacgaagcgatgattggcgagcgcgccgcagccagcccgcaacgcaatatcactgaggaaaccttgttgcacacagtccagctcggcggtttcgacaccttagaggaggccgaagcctcccaagcgtaatactcagccattcactgtgtatcggacaccccgactgatgtacgtcggccggccatacccaggccaacgcaatctgccgatcgccccacacccagaccgccaacgcagcctgcccgccaggccccatttaccagcgcacatcggcagaattacagcgagaataggccccaaaatgccagtgtcatcagtgtggcgagagtgccgagcgctaccatcacgcatatgacgcgccgcacaccgacgatatcggcgcggcaataccagacacgttccatttcccaagcaaacagcaccaccaacagcatggtcgctattcgcagcaccacccatccgacggcaaacagccgcggttgaggcataaccaatacagccgatacgcctacggcgctcatatagccgtacaacagcccagtaatcaccatcaccgctgtgccgataccggcagataagccggcaatgccgtgcaacgtacgctgttgggcggctcccagcccactcggcgtcgcatgcatggcccgcacagtcgccacactacgtcgcccggccagcaacgtctgtagccaagaaaacacagtcaagccaatacctaatatcgccgccatcacgatcagcacgggccctgccaccatcagaccggccagcacgccgagcgagccgacgataccggatctggtacgttgcggcgcggcgaagcgctggtgaggtgtcgcaccggcgacttggggcgttgcccatccatcggctttggttccggcagtcacaccgttcacccaattttccagcgcttgcgtatagccttcggccaatggcaggttcggggtgaataagccctcaccagcccgcatctgatggttgccggcgaaatagcgtacggtgacgttctcgttgccggacttgttggccgtggcgatgatccgctgcgccccctgttcgatgggcatggccgtatcgtaggtgccgtagttcaccagcaccggcatggtgagggatttcagataccggtcggcatcaaagtcggcataggctagatcaaatggcgcgtagtccagcgacatcaatttggccatgtctttgaccacgggcttgggcgcgccggcctcatgcgtataggcgctgacagccatggccatttgctcacgtccattgaacaccggtgcggatgtaagtacggcaaaggcaatgtcttgccgtttcgaggttagaatcgtggcgatccaggtgccttcggattcggcgtagatgccggttttggcggggtccacgccgattctgccacgcaacacgtcgagcgaacgcccgtattcgcgagcaaaacgcgggtagtcgcgatgcagcacggtgtagttgtcgttgcgcttggccggcaccaaggtcacgataccggcagaggccatggcgttggcgatatcgccgaaatcctcggcaccactggtaccggacccgtgaatgaacagacaagccgggcgtggcccgggagcgccgaccggttcacgtagtacggcgggtagcgcgacgccgtcgccggtcttgatggatagtcgggtttcacgcgtacgatatcgcccctcgtggggaatgttcgcatgggcaggggtgatggtggtgtcggcagaagcgataacgatgtgcttggtgtagggccgtgtgttccattgcggcatcatcgcccagccaagtgtggcgaataccagcgtcatcgccatcgcggcggcgatgacgctcgctacccgccgcaccgaaatccgcttcatagttactatgcctccccccatcagcatagaacggtcggctcttatcggtcggctcccgtcataatgtgcttctactgggaccgtaatgcaatggtttgtaacgctattttctcttcttgacggcaccgactatggcccatacaacggccactattaccagaatcagtcccactacggcgcaaataatagccgtcagcaattgcggattcggcgagaacaacgaaatcatccgatccggagatatgtacccgaaaaccagcgcgatcacgccgataatcacgcctaatagtccgaataccacagtaggcgcgctggtgctctgtttctggatgttcttggcattctggacatccttagcattctggacgttcttggcgctctggacgttcttggcgctccccccaggctggcatggtttgccggcggtctgagactgcccatagggaggtcgtgctgaagatgctgcgtacatcggcacatcatcggcagatggaatcggcccaccatctccctccacggcatcggcaactgtttccagggcaatccgatctgtggttggttcgatgggcgatggagaggcagctgttgcctgcgtatccacatccgagaccgacgcatccgcatgattgtcggggacgggcagcacagccgtttcgtcatcatccgctgcggatggcagcaccgtggtatcggttcggtcatcgacggtcaccatggttgtggtcgcggtggtcgcgtcggtttcggaaggtatggccgtggtcggtgtcgcatcctcgatggaggcgaattccttggtttcatcagtcatgattccatctcctagttgcaacggcttgatcattccgattgttcggttgtgttcttgcttgtactgttgccgtcgtatatatcggcaagcggctggaacgtagagccttcccaatcggaggcgtacaccacgttgacacgtgcttccaccacatagggaatattgatttttaattctgggccgttgtccggcatggcggattccttatacaaccattcgtgatcaggcccattggtggcactttcagcttcgaagaaaacaaagcttggacccatgtagttgttgtataccatctcgtatttgccgccaacgtcactcgaagtggagtagtaggagtcggcggtgccgaaggcgtaagtgcaggaatccggcagaacgatatgcacttgcgcctgtgttgcggctatggtgatggtaccgaccgggcaattactgatggaagttttgccatccagcatcttcaccgtgtgcggtccatgtgtcttgtcccaatcggaccaatcaatgattgcctgatcggtgttgtagttttcaccgctgaacgccacaccttgctgcaatgtttcaaacgtggcatcgctggcatcggcaacgaagatgccatccttttgcacatcgttcatgccgtcgctgtttctcgcactgacagattggctcagtgaaacaacagtattgatgccgctggcaccaagatcacggtagtacacgccatacgtgcctgaaacgatggtcatgcagagcgcgcatccaccggcaaccagtccgagaggaatcagaccaccggtacgccgtcctctgaatccgagaatgatgaccaccagccccatcactatgcatactgcggcaatccagatggtgcccagacgcataatgccgataatgcccatgtcgtttacccaaatcagtcccatcagaccggcaaaggagaggaaggtaaggcccagtatgctcaagaccacgattgggcccgccggcttgcggcgcttggactcggtgggggcataggccgtcgcattcatacggtcgggggcaaacggcccgttgggtactgtgccgggcatcgcgccgggcacagtacccggcatcacgctgggcatcgactgatagacaggctgtgaaacaggctgtgaaacaggctgtgaaacactaggcgcggtttaaattgtgaaacaggttgtgaaacaggttgtggaaaaggttgcggagctgaatacaaaggagattgagggaccggttgcgcggctggatatgagacaggctgtggagctggatatgacacaggctgtgaaaccggtcgcggcgcagatgccccgaatccgtacccttcctgctggcgaatgccgcttttggccaacagccatagcgctaaggcggcgagcgcaatacaaccccaccccgcacctggaatcacgattgccacggcgaggaacaggaagcatcccagacaattccagtcccattggccggcaatgaggtcctcggccaagatgtgtccatcgcgtacatccggcatcagaaaccagccgaatgcgtacagagctgcgccaaaaccgaagaacaatgcacatacaatcaccaacgcacgtactaatgtggggctccagccaagccgtaaagcgatgccgctgcatacgccgccgatccaccggtcgtcgccgcgaaccagtccactggatcgcacccaagtgaagaagcgtcgcgatgtcttgtttttttgcggaccaggctgcggctgtggctgatatggattcgcgtttggattgctcatgattccattacaccgcccgatcactgccacaacgctcggggaacaccctgattgttccctgaacaccgggtaaaaccccggccgcaacgccctgagcgcggcacaataggagtatgacgtcatctcccgaaccattgctgcccgcgcgcatgccgttgatgcgcccccggcagggccgttggctcaccggcgtgtgcaagggcatcgccctgcacttgggcatcggcgtggcatgggttcggattgcgttcatcgcactgaccgtcctctacggcgcaggcatcatcgcttatgtattcctgtgggtgttcatgcctgccggagacccggtggcggctgcggctcgcacagtgcccgttgatcaggcgccgcttgcgcgaggcaatcagccacttgccgctcatgacgacgaatcggctgccgcaccggaatcattgtccgaggccatccaacgtgctccgaaaccggccgtcgtggcattggccggtttcgcgttgatggccactggactgttgctcaccagcaccggtgcggatgtccagattgtgtttccgctgctggtagggttgggcggcatcgcactggcatggatgaatcttagtccgcgaggcacgcagctgttgtctatgttgggcggcatcgcactgattttcatgggatgggcattgtatgtgcataatgtcagcattcctgggtggggcacctctcctcgacgcattgttgccagcggattcgtgatgatcgtcggtatcgtggtggcggtgatgccgtgggcgaacgcgatgctgcaacgactcacccacgagcaggcattgaaggagcgcgaagaggagcgcgcggacatgaccgcccatctgcatgatggcgtgctgcaaacgttggcgctgattcagctgcactccgaggaaccgaccaccgtattcgccctggcgcgtagccaagagcgcgagctgcgcgaatggctgtatcaggaacgttccacatcggatcgttcggtgggagccggattgaagcagatcgccgccgaggtggaggacgagcacggcaagccgattgaggtggtcaccgtgggcgacgcgcggccgagcgcccagaccgatgcgctgctggacgccacccgtcaggcgttggtcaatgcggtcacgcatggcggcgagccggtgtctttgtattgcgaggccagcgacacgatggttgaagtgttcgtgcgcgaccatggcgaaggcttcgatatggacgccattccgcccgaccggctgggcatccgcgaatcgattatcggccgcatcaaacggcgcggcggtacagtggagatagtgtccagggccggctggggcaccgaggtcagaatgcatatgccgatcgcgctgaaagcggcgcagggagaacatcgatgagcgagaacgagacagccaagattcgtgtggccgtggtcgatgaccatgagatgttccgtgcgggcgtaatcgccacgttgcgcgattccttcgatatcgtcggccaagcggcggacgtgcccggttcggtggcgatgatcgcacagaccaagccgcaggtggtgttgctggatgtgcatgtgcccggcggcgagggtggcggcggtgccgagattctcgccaaatcgcggccctactcccccactaccgtgtttctggcattgtcggtttcggatgcgccgcaggatgtggggtcggtgattcgcgccggcgcccagggctatgtaaccaagacgattaccggcgctgatttgatttcatccatcaagcaggtgcatgagggctatgccgtgttctcgccaaaactggccggttttgtgctttcgaccttccagggtgtgccggcggcggggtctgatggcggcgctgatggtgcggcacgggctcatgatgaggagctggaccggctgtccgcccgcgagcaggaggtcatgcggctgatcgcgcgtggttacacgtataaagaggtggcggccgaactgttcatttcgatcaagacggtcgaaacgcacgtgagctcggtgctgcgaaagcttcagctttcgaatcgcaccgagctcacccgttgggccgccgataggcgcattgtgtgataaacgacagatgagctccctcatcagagggagctcatctgctcatatcactccgcgtcgcggaaaccgttggggttcttggtctgccagttgagggaggaggcggccatgtcgtcgatggtcagctcggccttccagccaagctccttctccgccttggaagcgtcggcgtagcaggcggcaatgtcaccggggcgacgcggcttgatcgcgtacggaatcggatgaccggcggccttctcgtaagccttgataacctcaagcacggagtagccgtggccagtacccaggttgtagacgaacacgccttccttgtcgatgtggtcaatgacggccacgtgacccttggccaggtcgaccacatggatgtagtcacgcacaccagtgccgtcgggcgtgtcgtagtcgtcgccgtagacctggacttccttgagctcgccgaccgcgaccttggccacgtacggggtgaggttcgccggaatacccttcgggtcttcgcccagcaggccggactcgtgcgcgccgaccgggttgaagtagcgcagcagcacgatggtccaggacggatcggccacatgcacgtcgcgcagaatctgctcctggaacagcttggaggtgccgtacgggttggtggtgccgccggtcggcgtctcctcggtgatcggcagttccttcggcgtgccgtacacggtggcggaggatgagaagatgatcttcttgacgttgtgcttcttcatcaccttgagcagcacaagcgtggagtacaggttgttgtcgtagtattcgatcggcttggccacggactcgcccacggccttgagaccggcgaagtggatgacccagtcgatgttgttttcagcgaagacgcgttccatgagcgcctcatcgcgcacgtcgccgtcataacgcttgaccggcttgccggtgatttgctcgacgcgctcaagcgccacgggcgacgagttgccgtagttatctacggaaataacgtcgtagcccttgtcgagcagttcgatgtcggtgtgggtggcgatgaatccagcaccgcccgtaaccagaacagtagtcatatctcctcctttggaaggacttgccttcggttttccttcagtattgagcttacttcacttgacctgtttcacctagcggcaaaaccaagactttcgaggaatgtttgcgtggtggctttctgcttgaagacggccgtgttgccgaggatgcggtagcagacgctgccgagctcgtcacgtacggcttggtggatggcctcgcggtcgcggtttccggccaatgtttcagcgagttcgccccattcgagactgaattcgctgacttcatcgggcaaatcgcggccttcggcgagcgcctcctcgacgatgccgagctggtcgacgagccgtccgggcaggatgaacaggccttgggcttcgatcagtccaatcggctcctgcttgaccggccagtattcggggtgtgcatggaaaataccttccgggtactcgtcgctgatcgcattgttgcggaagatgagactcatctcatagccacgttcggtgatgatcgcgctgggcgagagggcggattggcggttgccgtccgcgtcatggctggcgatgccgttcgccgcgtcgtcataaccgacccatgcctcgcggatgatgtcggatacgtcgatgatgctctggcgactcttcgacaccacgcgcacggcggtgccgggccagtcaaggatttcaaccacggcgtccggatagtcggcaagtgtgaaggcggcccaagtggcggccttgtgcatcggcagcagttcgccgccgccctggtaatggtcatgggcgagcaccgagccgccgatgcgaggcagcgcggcgttgcatccgaggaagtatccggggaaacggtccacgaagtcgagcagatggccgaaggtgtcgcggtccacatgcatcggcgtgtggtcggtgttcacgcagatgccgtgctggtcgaagtagccgtagggcgagaactgccagaaccatgactcgccgccgagcgtgaccggcaaggtgcgcagcgtgcgcttgtcacgtccggcgaagccctcgttctcatggcagatcgtgcacttcgggtagccgccggccacggcgttgccggccgccgccttcttcatgttcttgaattcgggtttggcgaggttgatggtcactgtcagcccgtgcgagtcgaagcgcgggttccggtcgagctgggcacgcttgacataattgttggccacacagtagtcgtagaaccattgcatggcggtcatgccgccatcccggtgctcgacgagcaggaatcggtcgtcgagatcagcggggttggcggagaggatgcccatgatggtgtcggcgtaggccgggccttcctccggcttgaaaaggccggcggttgtggcggcggcgcggaaggcggcgagcagggggtcgggggtcttttcgccatagggggcctggcttcggctgccaacaatgtcttggactacgtctgacactgacgccgccgacgttgtggttttgggtccggggtaggaatctaggcggaagagggcgaagatttggttgcgggtccagtctgcgttgcgtgggtcaaggtcaagatgggccaaggcataatcgatcagggcgtcgatgctggcgtatacctcggtcagctgatcgttcattgctctgcctccatcatgctggttcgggtatggttcggctgacggctcacctggcagcctccatgatgtcggctacgatggcgcgggtttcgctggccttctgctccatctcctgcacgagtttgatctgggtgcgggtgcgcaccagattatgctcggggtacttggtggcaaagtagatatcgccttccaagtagtcggcgagaaagcgcatgccgcattccatggtgagcaggttgccgctgaacggcagcagttcggcctcgcgcgcggtgatgctgccgcgtagttcgcccacgaagccttccgtgtaggcgcggaacagctcggtgctgaaatgcaccttgctgaggtccttttcgtcttccagagcagtggacgcaccaaagcgtatggaatcgccgaagtcgaacagcatggagccgggcatgatggtgtcgagatcgatgatcgcacgcgccttgccggtggtggcgtccatgaggatgttgttgagcttggtgtcattgtgggtcacgcgcagcggaatcgaaccgtccctgagcccatccatcacgacggcatactggtcggcgtgactcagatagaagtcgatttccggctggcatgcggcggcgcggccgagcttgtccgcggcgagggcggccttgaagtcctcgaaacgatgcggggtgtcgtggaagtgggcgatggtttcggtcagctggctggcgtcgaattcggacaggaagttctggaagtcgccgaatgcgctgccggcttcgcggaacacgtccgggttcggcacgaggttgtaggacacggtgtgttcgatgaacttgtagacgcgccatgcgccgccatcgatctcggcccaggtggcgccggaggtggtgggcacaatgtccagcgtctctttgccctgagccttgagagtggaggtgaccagttcgacattgcgcatcagattcaccgtatcggggaagatgctggtgttcatctgttggaggatgtagcgggggccgtccgtggtcaccagataggtggtgttgatatggccgtctccgtaaggttcgatgccggtcacggcaccttccagcgcaaaatgcgaggcgatgccgaataaaatttcattgctttcggtcatgatgggtccgttctccaaaacgcgggatcaggcttcacgccatgcgatgccgctgtcgggcaggtcgaagtcctcggtggtgccatcggccagagtcaccgtggtccgctgcggctgatcggtgttgttgattacgcagtacaacccttgctcggggaagtgcgccacctcgcactccgggttggacgagctccaagccgcatacttgtcttcgttgtgggaggcgtagaacagcacgcgttccagcaggcgggcgttggccgccgaatagggcagaccggagatgtacacaccgcggccttcgccataatcattggtcgcgagctgcacctgcccgccgtccgcgcgcagcagggtcacgttttcattgaccggatacgtgttgagcacgggttcgccgaagtcgatgccgcccaacggcttgatggactggccaccgccgcaaccgctcagcgggatgcggtagccggcctgttcccaagcctcgcgggccgccgggtcgaccggcacatcggcggtgatgaagtggtccggcaccaccggtgggaagtacttgtccacggagagggtctgatagcgctcctcgtccacgccaatcacgtcggccagctggaagaaccggcccgcttggaagcgcggtgccgagctcggctcgcccacgcccacgaacgcgccgccaccacgcacccaggcgcgcacggtttccacgagcttcgggttggtccacacgtcgccgccggtgaatgcggtgtcgaccgggccgccgttgatgattacgtcgatatcgctatcgatgccatgcgcgagtacgtcgtcgaagctgatgaaccgcacgttcacgcgcatgccggacagggattccagaatgccgtagtaggagtaggtctgcttgttgggcagggcgtgtgccacggtgaacgccatccaggagcgcatcttgccccaggaattcagaatcgccacgttgagctcaccttcggcggccaccccaccggtgcggtcgtggatgtcgcggaattcgttggcgatatgggtcaccgtgtccacgaacttcgggaacttggcggccagggagaggtagccgccgtagcccatgcggctgatcggcgagcgcaggatcgcgcggcgggccttgcgccagttgtcgaggccttcgatgctcggatcgttgccctcgtagaacgtgtcggggaagaagtacggcaggaagcgtccttccgtgtatttgacacccggaatgtccgcgatcatgcgggtggtggtgccgtctccgatggaaccgaccacggcgtccaggccgagttcgtcgaatccgtccttgtacggttcggtgccgatccactggtcgccgaggaacatcatcgcctctttgccggcggcgtgggacatgtcggcgagctgcttgacgttttcgcgcacgaagccggagaggaagtcgatccagtcgcgctgggcttttctgggcacgcgccatgcggagttgtaggcaccgccatccacgaaatcctccggacgcagacggtaaccgtactccttctcgaaatcgtccaatgcgcgcgggctcacggtgcaggcgcaaccgaaccagtcgaccaccttttcgcgacgcttggcatcgaacaggagcgtgaactggtagaagaacgtggtgaaacgcaccacatccacctgcgggctgtccttcagccactgctcgaacgtatcgaacacgaacttgcgggtggccggatggtagatgtcgaacggaatctcgtgttccttgtctccccaatcattggtcaggtggttgtacatctcgaccggatcccagatgatgtaggccaggaaactcaccgtgtattcgtgcatcggcacggcagcggtcacgtgcacggtgtcctcgcccgggtcgagcgtccagccggacgggtccacgacctcgcccgtggtgcggtccacgacttcccagtacttatgagggtcggcgtcacggttaggcttgagctgttcctcgaagaaaccgtccatcagcggcacatccaccgcgttggactcggccaggatacgggcggtcagcaggtagacctgcggggtctcgtccatgtgcagggtgatccactcgttgtgggcgcgggtcgggaagtaggcgctgtagattttcttgccaagagcgagcactgcctcgtccagatgcgtgccgtcggagttgcggatggcgtccgcaccccacaattcggcgagttccttggtcttttcggcaaaattctcttcactgggcagcgtgaagcggccggtgctggtcatgagtgctcctttgcggggttggtcatcaaaaaaactacaaagcgacgaattcgtcgcatacaaaatgaccggcgtcatcgcgggccctgggaccctgactgcgtagatccttgacgcttacggtgacgccggacgattggaatcgtgtcactgaatatgggagggacgttgcccggcaccggaaggagtgacacgacatgccgggcagcggattggttagcccttgacggcaccggcggcgaggccggactgccagtagcgctggaggccgaggaacagcacgatcacgggcagcacgccgagcaacgcacccatcatcagggcgccgcgatcggtgaacgtggccagcgagaccatgccgtacagaccgagggtcacgggcttcaaggtgtcggaagacaccatcatcaacggcagcaggaagttgttccacgtggccacgaacaggaacaggaaaatcgtcaccatggccggggccaggagcctcagcacgatggtgaagaaaatcctcgcctcgctcgcgccgtcgatgcgggcggcttcaagcagttcgtccggcaccgaactctgtgcgtacgtgcggcccaggaagaagccgaacggcgaaacgcagcacgggatgatgatcgagagcatagtgttggtcaggtgcaacgtgtggaagatcgagtacatcgggatggtcagcagggcggacggcatgagcatgcaggccataatgatgccgatggccgcgttcttgccgcggaagttgaattttgcggtggcgtagccagccatcacagacacgatggtgccgatcaatgccgagacgcccgagtagatcagggagttcagcacccagcgccagaagttgccacgagtccagccaagcagcttggaatagttagtggcgatggcattgggcagctggtcaagcggcacagcaaaccacatgccgttgctaccggtcatctgggccggcgtcttggtggacgcgatgatggcccagtaaatcgggaacaggaagtagatcaacaccagtaccagcagcaccacggtgagggtcttcacggccgcggacggtcgcatggagcgaggcaaatcgtgttgcgcagcctgacgctgcttttcgagcttgcgctcggcctttttgcgggcgcgttcttcaacggttgcggagctcattactcgttcaccttcctttcggccaaggtgtacagcacggcaagcacacctgcgatcagagccatgacaatggcgatggccgaggccggaccgtcaccagacggggtaatggtgccctgagaagtgttcatggccatcatcatcggtgtatacgacttggaaatacccggatcagccgtagacatgatctgcggttcgttgaacagctgaatggtgccgacgatggaaagcagcatggccagcagggccgcgccacgcacgttcggcagcttgatcttcgtggcaatctgccaaccattggcgccgtcgatacgggcggcctcatagaggtcatgcgggatggcctgcagtgcggcaaggaaaatcagcatgttgtagccggtgaaggtccatgtggtgatgttggccatcgagccgagcacgatgttcttgttgaagaagtccacattgacgccgatggcggcaagtcccttgacgatcggcgagatttggccgttgtacaggtagacccagataatcgaggccacgacgccggggatggcgtagggcaggaagtagcccagacggaaaccggtgacatgcttgaccacgaacgagtcgatgacgatggccaacgccagtgcggcgatgatcatgatcggcacctgaatcagggtgtagagcagcaccctgccgacgccggaccagaagttgccggaagtaatagcatactggaagttctggaatcctacgaatttattgaccagctcgccaccgccgtatgcgccaccgccctcggtgacctgacggaagaagctggaatagatggcccagatgatgggcaagatgaacacgaaagtgaacaggacggcgaacggtgccatgaacgcccagccggtgcggttctcgcgcttctgagtgccggaccgcttcggcttggcggcggcacgcctaggtgctttgcccttcgcctgagtagtggatgcagtcataatacaaaacctgtcttcgcaaagaacagtaaaacaaatgacaagggccacagcgcccctgcagcaatacccccaaacaatacggaaggccggagtatgtgccccggcctttcgctatggtgatgcgaggcatcggaggtcttggacggccggctatttcaagccggcccgttgacaagacctagtgaggtcactccttgacggacagaccgaggttcttcagcgtatccaccgaggtcttctgagcggtgtcgaacacatccgaaaccttggcagaaccatcggcagccttggcggcggtctgtttcattgcagcgccgactgcggagaagccaggcatgtaggtgaagtcacccatgttgtcgttcgcggtcttgaactcagccatgacatcctgtccgctgaagtagtcggaccacttctgcggggtcttggcatccgcggtggtggcggccacgacaaggccttgggagacaaggtcatcaatctgggtgttgaaccagtcaaggaactccatggcttcggccgggtgcttggaacccttgagcacggccacaccggaaccaccatcggcgccggtcttggtgccattgccgaaccagtcaccgagctgggtgaccttccactcaccagcaccagtgccaccggcggaatcgatgaacagtggggcttcccaagcggcggccacggtgccgatcagctgaccggactggagggagttatcaaacgatgcatcccaacgcgggttggtgagggcggccttgttgtcgatcagctgctggtagacatcggccacggccttggagcccttagtctgggtgttgacaacccaggagttgccgtcgaccttgtaccacggaccggaagcgccggcctggccggacatcatcatcatggcctcatcaggctggaaggtcatgatgtacttgccttgggcagcggtcttcttggcggtctcaatgagctcgtcagcggtcttcggcacggtgatgccgagcttctcaaattcagcggcgttgtagaagtaagtcagcgggccggtgtcctgcggcagaccgtaggtcttgccgtccacctgcatcagtgcgaacgggacggaagcgaaatcgtccttgtacttggcggcctcatcggtgacatcctgcagaaggcccttggtgaagacctcaggaacctcggcgtaaccgacctgagccaaatccggcgcattgccagccttgacgtcggtctcgagcttcttgatcatgtcggcggcattgccatcgaacttggtggccttgacctgaatgttcgggtgctccttgttccacttggccacaatgtcgttgaccaaggtcatgccttcggaatcgggcagacgatgcatataggtgatgttgaccacaccgccatcgctgccggacttcgtgtcgccggcagtgtcgctgccgccgcaaccggccaaaccaatacccattgctgctaccgcggcaagagcagccacgatgcgcttgttgtgcgataccatatctctactccttcctagtgaaatcatcacctcagcgtgatgactgattgctaatttaggcctttgctcttttattgtcaacttagctaacaattaccgcgcgtcccgttgaggtgagtggcattaaaccgattcgatgctcgattgtgcgggtttgttcatttcattaactccccttacaaagcaacgtacttttggtccaccggtagacctaatgagatattggatagcggcaacaatccaagacgttagcttgcaatcgtccaccacaaattgcaagcacttgccaacattatcggttttcaggttgccggcgcgatacccgactaggggggcaccgcgccttaatgagacgctacacgagcagtctcagcaactggtagagctgccacaggctacgcacgttgaagtgcgtgccgtcaaccgtggcgttcgcctagccatcgcccacatggacgatcacggtgcgcccgttcacggtcagactaccgtgcatcgtgatatgattcatcttgcaaccttgttgattaaaggcgcaagccggtaatcaacgcaaaggcccgatgctgcaaacgtcgggccttttcttatcggctcacgccgattggcccgtcatatcaacggggacaccgcatgttacggcatcacaaactaatatatcagcaccccggtggcgatcaagaagacaggttccagaaaaagaaaaagggcctgggcatgttgcccaggcctcggttcgcggacagggcgagattcgaactcgcggagggttgcccctcaacggttttcaagaccgtctctttaggccgctcagacacctgtcctgatgcgcgttcacacgcgcaagtattcattatacagaagggagggatgttgatattcggcagtgcggtcggtcttggattcgcctgctggctattagcgatctctccctcagtcagctacgctgacagctcccccattaaagggagctaaagcacgatgagactcaggcctcccacttagtgggctcgatgacttccttgccgcccatgtaggcgcgcatggcctgcggaatctcgatggagccgtccttctgctggtggttctccatgatggcgaccagccaacgggtggtggccagcgtgccgttgagcgtggagaccggacgggtgccgccatcttccatacgctcgcggatgttcagacggcgagcctggtactcggtgcagttcgaggtggaggtgagctcgcggtagcggccctgggtcgggacccaggcctcgcagtcgaacttgcgggcggcggaggagccgaggtcgccggctgcggtgtcgatgatgcggtagggcacttcgaccttggcgagcatctcctgctccatggccagcaggtgctcgtgctccttgtaggagtcctcctgcttggcgtagacgaacatctccaccttgtcgaactggtggacgcggatgatgccggaagtgtccttgcctgcggcgccggcctcgcggcggtagcaggaggaccaaccgcagtagcgcagcgggccgttgccgaggtcgaggatctcgttctcgtgcatgccggcgagcgccacttcggaagtgccgaccaggtactggtcgtcgggctcgcgcagacggtagatctcgtcggcgtgggagttcaggaagccggtgccgcgcatgacctcggggcgcaccagcgtcggggtgatggccagcgtgaagccgtgctcctcggcctggtccacggccatggtgagcatggcgatctgcatacgggccacctggccacgcaggaagtagaagcgggagccgccgaccttgacgccgcggcgcatgtcgatgccggccacgccggcgccgagggtcaggtggtccttgggctcgaagccttcggccgcgaagtcgcgaatctggccaaccttcttgacgaccacgtagtcgtcctcgccgccttcgggagcttcgggctccacgatgttggagagcttccacatggcggtggtgtattcctcggcggcggaatcggccttggacttgtattcggagaccttctgggacagttccttggtctcggcgatgagcttggccttctcgtccgccggggcggaggcgaccttcttgccgatttccttctgctgggcgcgagcctcttcgaaggccttcagcgcctcacgacgtgcggtgtcggaggagagcacttcgtcgacgagttccacggactcgccgcgcttgcgctgggattccttgacgatatcggtgtgttcacggatgaattgaatatcaagcatgggcaccagactagccgcgtaagcagacaccgacaatggccgaatgcgcgggagtcacgcggaaatcacagggaagcccgggaaagtccgcggacgggtccacccggccaatttcgtcagatgagacgcgattgaaccataatcgcgccccacggggctgttgcgtgcaggaaatgttcacgtacggcgcaccatggccgcaaacgacctccccaccgataacaataggagccatgcctcagcctgtcctcaccgtgtttctgatcatcgccgcaatcgccattgtggtggtgctcatcgccgtcatcgtcatcgccctgcgcgcgcagcgccgccgcaagctggctcagacgctggagaagcgccgggacgacgaggtgcagtacgccttcatcgtgaatccgtccaaaccgcaggccgaagcccgcaggctgcatatccagaggttctgcgaggccaaggggctcaatcgcatccgcttctacgacacccagcttgacaaggacggcagggtctgcgcgcttgaggcgctggaggacggcgccgacgtggtgatcgcggtcggcggcgacggcacggtgcgcacggtggcgagcgccgtctccggcaccggccatgcgctgggcatcatccccatcggcaccggcaacctgtttgcccgcaatatgggcgttcccgtggacgatatcgacgccgcgctgaccgtggccacctcccacggctcccgcctggtggacatgggccgtctcaccctgctcgaccacccggaggacgaccacggccacgccttcctcatcatcgccggcatcggcttcgatgcggccatgatcgacgacaccaaccccgagctcaaggcgaacatcagctggctcgcctacttcgtgggcggcgtgaagaacctgttcgcgccgaagttccgcggcacgctgacagtcaccagcgccgacggctcgacccacaccatcaagaatctcgatttccgcacggtgatggccggcaactgcggccagattcccatgttctcgctgatgccggcggcatcctatgacgatggtctgctggacttcgaaatcatcgacaccaccggcggcatcctcggctgggccaacctgttcggcgacgtggtgcaccagacgatcatcggcaagcccgaacagaacccgctgtccacgaactcgaccatcgaacaggttcagggcgtcagtgccgaaatcacattggaaaagccggccaaagcgcaggtggacggcgacatgctaccggagacccgccacatccgtttctcggtggatcaccgcgcgctgatcgtgcgcgtgcccgacgcctccgcgctggaaaagaccgcgcaggccgctgcttcaaatgccacctcgaatttcgccgaaatgaccggtacactcgagccgattcgctaatccgttactacgatgcgtggccggtgactcgggcgacgtgcattgccagataggcggtttcgtcgtcgctgatatccgtgtcgaggcgcagttcgagcagggaggcgatggttcgcgcgcatcgtagcgcggcgggataggactcacgaatcaccttcatcaccggtgccggctcatccgtcagttgctggtgctggtggatgcgtacgaacaggtaacgcagatgggtgatgaacctgcccacattcacggaactgcggtccaacgtgatgccgtagctgtggtcgataatgtcaagcagttgctggatcacgcccgtcatcgtatacgtataggacaggtcgccggtggcgaagccggcgttgaccagatgcatggcaagcgcggtggcctcgccgtccggcagcgtgacgtcgagccgcgcattgagcgatgcgagcatcgcacgcccctgcgcgtattcctgcgggtacaggttgctcacctcgccgagcagcgggtaggtaatgtcgatgccgcgccgcacccgctccaccgcattcgccacgtggtccgacagggccatgaccagcgtggtgctgccggtctcgcgctcccccagtccggcttcctgcatggattcgacgaccacgcggatgatttcgggcggaatgtccgccagcatctgcgccagatggtccgggtcacgcccgtccgacggcacgaaggtgcgcacgactttcgactcgtcgaccgtctgccccggcttggcctgaaaccccagtccacggccggtgagaatcacctcaccgccgtcgccgcctttggcgagcacgacgttgttgttgaacactcgcagtatttccatggcatcctttcgcaacgtcattgttccacatcgatgatcgggctgccggctgatacggttttgcagtcaccgccgttgttgtcgccgctaccgtcgccgatcaacggcgtgaccacggtcagttcagcggcgttgaccaccgtcaccaccaccacaacgctgtgcccggccgccgcgactttgccgaaatccacggtggccagtggctctcccgccgcgatccgctcgcctttagccacgaccacagcgaatccctcgccatccatatcgacggtgtcaatgccgatatgaaccagcacctcgatgccgccatcggttttaatgccgaaggcatggccggttcgggccacggttttcagcatgccactgaccggtgcgagcacggctgtctcaccggtcgtctccggcacgacgcctacgccctcccccagcgcgcgggaggcgaacaccggatcgccagtcgcttccagattcaccagccggccggcgaccggcgacaagatggcgttggagtcaagagcccgatcaggggcagcccgcgatggagaatcttccgcagactccacatccgacacggtcgtgtcaatccccctcgccatatcctgcgggcgtgcgttctcgtctgccgagaccatctgcgtcttggtggcgcgcgacggcgtgcggtacccgaacaacaccgtcaacaccatcgccattacaaacgcaacggcgatggacagcgcgtacacccacatccgatcgaacaccggaatcgtcagcaacgaggagaaggcgaatgccatagtcgtaacgccccggaccatctggccggatggcagcacggacgggaacagccagccaagcaccgcgctggtcacgccgccggccgcgcagccggcgagcagccagcggtagacgcggcggtgatgcagatggatgccgtacaggctcagttccgaaacgccacccagcaatcccgcgagcaacgcccccaccgcggtctgccgcatggccgaatccttgccgcgtacggccagcacgagcacgccagcggtggcaccgaagcaggcaaagttccatacacccatcggaccttggacgaaatcgtagccgagcgcctgaatgttcatcagcatcagggcattcaacggccagtgcagaccgagcggcacgagaaacgggtagagcatcgggatgatgaacgcgaataggaacggcacgtgcgcgttaagccatgctgtggccgctcccagcccaccgccgagccatattcccagaggcccgatgaccagtatggtgagcgcaaaaacgacgaccagtgagaggaatggcacgaacaccagctgtacgctgtcgggaatgacgcgcttcaacccgtggtagaccacggcgagcacggcagccatgagcaacggcacgaagacgttgccgccgtagtcgttgagttgaatcggtatgccgaacgccgacacggtgcaggtttcggcgccgaatacggcgttggccgagcattgaatcgccccggagagggcgctggatacggacgtcccggacattccggacatcacgccagtaaactgcggggtcatcagcgcggccataatcgcgccgccgagccaggggtcgacgtccagtttcttggccgcattgtaggcgatcataatcggcagaacggtgaacacgccctcccaaatcgccttgagtagtatccagccggcggaggtctcgccgtcaggcacgatgccgagtgcaacgattacgttgacgatggcgatgaccagcgaggcaccgagcagtacacccagaatcgggcggaacgagtcagacaggtagtcgaaaaacgcggcagcccaagcgcgggcggcactgccccactcgcggatggtacgaggcatgaagtgacgggatgtattggctgggccgtgactctgctcggtgtcggtatcgcgcaatggtgcgacgtcgtcggaaaggttcggcgcggactgcgtaggctgcgtaggctgagtggattgcgttgactgagtggattgcctgagtggattgcgttgactgagtggattgcgttgactgagtggattgcgttgactgagtggattgcgcggactgcgttggccgcgacgccgccgatggtaattgcgttgccggagtcaatcgcgctgcctgcatccgaacgatctgctcgtacaccgaggcgaccgctccgccgatgatgacctgataacgattgccggctcgcgggaatgcaccgaggactccggggatggattcaagaccgtgctggttgacatggccggcatcggccagttcgaagtgcagtcgcgtggcgcaatgggtcaggctggtaatgttcgcggggccgccgacggcatcgacgatgcgcgccgcaatcactgcaggcgttgcgttcgatgcgttcgccacggttcctccttgctgccgtatgccactgtgttccattatcggcgctgggtgccccaaaagcacggcaatgccggcaaagcatcgcgaaacggcaactatgcgctacggtgctccgcgatggtgtcccgccataatgttccgcgatgatgcttcgccacacccgttctccgtatttgccgcagcgcccattccgacatcattccaccatgcagaatcctgcaatcgttgtcaaaaatcatcgttttttgctgcctattcggagtgtcgcgactgcggaagtcgtattctatctttcacacacgttgcgtagcagggttgttactcaaaacgaggcaagacctggagcgacgtggaatttgcgtatcgtaatatgcgaattccacgttgttccaggtcttttttgttttcgggcgacttcagacaatcgaagcctgaccttgcacgcggcagaggggccacgcaacaggcgcggtccgtcaacggcgaaaggacaaggcaatgacgacgacaacggcatcacccgtatcgaaacagacggcatccgcggcgcaggaaaccagcgcaaccggggcggcggccaccgcaatcgaaaccatcgaaaccggcgtggccggagtggcgggcgcggccacaaacgcggcagccaacgcaatcgaggacctcgaagccgccgaatcgcacggcttctccacgcgcttcccgctcaacagcgcattcatcttcaccttcggcgcgctcggcggcatgctgttcggtttcgacaccggcatcatctccggcgcctccccgcttatcgaatcggacttcggcctgagcgtctctcagaccggtttcatcacctcctcggtgctgatcggctcgtgcgcaggcgcgctgtcgatcggcgcactgtctgaccggttcggccgcaagaagctgctcatcgtctccgcgctgctgttcctgctcggctcaggcctgtgcgcctcctccaccggattcgcgatgatggtgtgcgcccgcatcatcctgggtctcgccgtcggcgcggcctccgccctgaccccggcgtacttggccgaactggcgccgaaggagcgtcgcggctcactgtccacgctgttccagctcatggtcaccttcggcattctgctggcctacgcctccaacctcggattcctgaaccacaacctcttcggcatccgcgactggcgctggatgctcggttcggcgctggtgccggccgccttgttgctgctcggcggcctgttgctgcccgaatccccgcgttatctggtgaacaagggcgacacccgcaacgccttcaaagtgcttacgctgattcgcaaggacgtggatcagacccaggtgcagattgagctggacgaaatcaaggccgtggccgcacaggacaccaagggtggtgtgcgcgaactgttccgtatcgctcgtccggcgctggtggccgccatcggtatcatgctgttccagcagctcgtgggcatcaactcggtgatctacttcctgccgcaggtgttcatcaagggcttcggcttccctgaaggcgacgcgatctgggtgtcggtgggcatcggcgtggtgaacttcgtgagcaccatcgtggccacgcttatcatggatcgtttcccgcgcaagggcatgctgatcttcggttccatcgtgatgaccgtttcgctcgcggtgctcgccgtgatgaacttcgtgggcgacgtggccgtgctggcagtgccgacgatgattctcatcgctttctatatcctcggctttgcggtctcgtggggcccgatcgcctgggtgcttatcggcgagatcttcccgctgagcgtgcgcggcatcggctcatccttcggctcggcggcgaactggctgggcaacttcatcgtctcccagttcttcctcgtgctgctcgatgcgttcggcaacaatgtgggcggcccgttcgcgattttcggcgtgttctcggccctgtccatcccgttcgtgctgcgcttggtgcccgagaccaagggcaagtcgctggaggaaatcgagaaggaaatgaccaagcgctagacaaccggcacacgattcgcacaaaagttgacaactcttaacataagagtacccaaagtggcgaaaaacgtggcagaatagggaacatggtagcaaacaatgcgggtcagcccgccaccccagcagatctgattaatgtcgatgaggttatcggcaagtactatgacctcgtccccgatcccgaagtccccgagcagcgtgtcatcttcggcacctccggtcaccgcggatcgtccctgaagacctcgttcaacgaggcccacatcatcgccatctcccaggccatcgccgaataccgcaagaaggccggcgtcaccggcccgctgtacctcggctccgacacccacgcgctgtccggcccggccaagaagaccgctatcgaggtgctcgtcgccaacggcgtgcacgtacgcgtcgattcccgtgacgacttcgtgcccaccccggtggtctcccaggccatcctgacccacaaccgtgcggccgacggcacccagcgcttcgagggcgagggcctcgccgacggcatcgtcgtcacgccgtcccacaacccgcccaccgacggtggcttcaagtacgaccccgtcaccggcggcccggctccggccgagaccaccaatgccatcgccgctcgcgccaacgagctgctcggcgacttcaagtccatcaagcgtgtgccctacgaggaggccatcaagtccgagtacgtcgagggcttcgacttccgcgagcactacgtggacgacctggagaacgtcatcgacttcgacgtgatccgcaactccggcgtgcgcctgggcatcgatccgctcggcggcgcttccgtgaactactggccgctcatcaacgagaagtacggcctgaacatcggcgtggtgcgtcctgaggtcgacccgacctggcgcttcatgaccatcgaccacgacggcaagatccgcatggacccgtcttccccgtacgccatgaagggcctggtcgacgagctcaacgccggcgcttgggacaagtacgatctggtcggcggcaccgacccggacgccgaccgtcacggcatcgtctgcccgaactggggcgtgatgaacccgaaccactacatcgccgtgtgcgtggagtacctgttcggcggcaaccgtccgggctggcctgagggcgcagccgtgggcaagacgctggtctcctcttccctgatcgaccgcgtggccgcatcgatcaacgcgaaggtcatcgaagtgccggtgggcttcaagtggttcgtggacccgctgttcagcggcgaagtcgccttcggcggcgaggagagctccggcatgagcttcctgcgcaaggacggccgcgtgtggaccaccgataaggatggtctgatccccgacctgctggccgccgagatcaccgccaagaccggcaagaacccggcccagcttcaccaggagcaggtcgagcgcttcggcgagtcttggtacaagcgcgtcgacaccccgaccacgctggagcagaaggccaagttcgccaagctgaccggtgatgatgtggccgccacgcagctggctggcgaagacatcaccgccaagctgaccgaggcaccgggcaaccacgccaagatcggcggtctgaaggtcaccaccaaggacaactggttcgccgcccgcccctccggcaccgagaacatctacaaggtgtacgccgagtccttcgtctcccccgaggctctggacaaggtgctcgacgaggccaccgtcgtggtcgacaaggccctgagcgagtgaaatcgctgcgttagtcgcgttcaccgcaactaataaggctctgcattggattcatacaatccactgcagagcattttttagtgcatatgcagttcgcgaccactgaaacacgcaggtcaacggttctcctcatgcaccgtgactgcattttctcaacatcactgcagggcaggacggccagatgaccgcgaaacgttcgcctgcctaccatcatcattgtggggtcacagcggccagatgaccgccgaagcgttcggtcggcttgcatcatggtcgagttttaacatcgttgtgggacgccacgacgaatttgcccattccagagttgccatcccacaaaagcgtgggacaacagctaagtcaatcgttttacatttccccccatcccacacactcaaactggaaaccccggaaagacgccattcctgccacacccgtcacagccattacccgaggggccgtgggatgccacgcaaaaatcggcaaaacacgcgtagcgtcccacacccattggcgcaaatccacgcccaatgcaccgccccccccaatcgaccactatgacacatttccctccacaatcgaacactagtcattcacgaaatccatcactacgaggcatcgcaatcgaacggcatgcaatatcaagcacacaccacaacaacaggtcgtacaaatattgcctttacatcagtccgtttcggacattatggtcacagcaggctctgcgacaactcttcaagagacatggcaactacatgaaactcgaatacggcaccgcgcgaagcaagcgccctcgccacattgaaagcgaattcagcacgagcgtcctcgttagcgatacttgccgccgtggcgacgaagaccagccatctccgcccgaccagcacaccccttttctcttggtcacggcgccattgagtcttactcgtacgatgatgatcgccatcatattcaacagcgaccttgaactccggccacgctaagtccaacgttatgggagctccagatgcaaaagccgcgtccggcaccacatagttcgcaaccggccgtggaatcccatgcgctaccagagagagtcgttcttctgattctttgggcgaatcagcaccaggtgatatcagaggcaatgctcgaacgcaggacgggcgccctctgaatcgggtaaattgctccacgaacctcaccagatcctgatagattgcagcagcatcacgatccttggccaatactggctgtttgctcgtagcagcgatgacggcatccccgagcacaatcagggactcaaaagaaacatacggggcaagttgggcccatacgtgaaacaggtccagcgcaaacacgtgttggttcatttccacattggcggctttagccgcatgtttccaaatatgcgtttgcagtggtgcatggcgtgtacgaaaccgcttgctcttaacgctggatacagtgtgcagcttggccgagtcgaggtcgcaatcggcgggaatcggtacggattgcagagcgagggaagtggtcatgccgaaaagcagcttcttgcccgcccgtttcgcttcctcagtgcagcgtgcgaccatgtcgcgtctgcgctgggcgaggctttcgctcatggtcggtgtcgctgcagaatcatgtgcaccactgttcggcgatgacgagtcgcgagaagtcgggtatttcgagtcagtagaaaatgaccccgcaaattcaggcggaacaaaaaccgcctccgattcttccggaggctgatcgtatatagagcctggcagagctccatagttggtgatgccgtcggtcatcctgttcatgacaccaccatatgggtagtgggtgcggaaacggaagccgatccgaggtatgtggtcctagcttcacttacgcacattcattgtggataaccatgtggacacctcacttatacacatagtcatccacctcttcaaccccgatttgacacactaactgtatctgatatgattacagtatcataactgtacacatcatagttacagtatcgactcggtaaggaggtcgtttcatgaacggcgaccattcactggcagtgcacgcattggtctaccttgaccatcgcgccacacacctgcccagtcagatcctggccgagaacatatgtaccaatgcggcgcgcgtgcgcaaagtaatgcgaccgctcgcctcagccggactcatcgccactaaagagggtgctgaaggcgggtacgctctggcccggcccgccgccgaaatcactttgcgcgcggtagcggaagccaccggcaccacttttgtgaaagtgaactggacaccgggcgacgtacacgaggactgtctggtgtcatcttcaatgggcgcagtgatgaacgacatctatgccgggctcaaccgcacttgcctcgaacaactcgaacacaccaccatccacgacatcaccgaacagatattcagcgagcgcaaaggctaataatcccgcgcgtttcccctagccagcatcagtcgataacgcttcggcagtcaaagaagaaaacagacgccgcacggcacacaacacatcagcacaacgcactcttatcactcgaatacgtaaggaagtaaccatgtccatcagcacacccaatgccatcagcacacccaacacctcccccactatcaccaccgacgccctgatcattggattcggcaagggcggcaaaaccttggctgccaagctcagtgcagccggccgcaaggtcgtcgtcgccgaggcaagcgccgacatgtacggcggcacctgcatcaatatcggatgcttgccgtccaagtcactgattttgtccgccgaacaggcgcggcgggatggcgcgaacagtactcccgaaacccgcgaagcagcgttcgaggctgctatcaaggagaagcgccgcgtcacttcgatgctgcgcgacaagaactatcacaagctcgccgaccaagacaacatcaccgtaatcaccggccgcgctcacttcaccggccctcatagcgtggaaatcgccaccgctgggggcccggtcgccgtgaccgccagcaagatcttcatcaataccggtgccacgccgcgcattccggatattcccggtatccgcactacgcccggcgtctacaccagcactggactgatggatctcgacgatatgccgcagcgactggtgattatcggttcaggattcattggacttgagtttgcctcgatgtttgccgatttcggcacggcggttaccgtgctgcagcacaatgccgagttcctgccgcgcgaggatgcggatgtggcggccgcgattcgcgcacagttggaagcgcagggcgtcaagttcctgttcaacgcggataccaaggccatcgcgcctgctgctgacggcggcgtcaggttgtccgttgcggtgaagggtatgactcgcggcgcatcgcaagcttgcgattccacccccgccggcaccgggaacgctcataccgatatcaccggtgccaccggcgccaccgacactacaacaaccaccagccccactagcaacccgaccgatcacgccacgatgtcacacgttcaaacgaaaccatcagacgatggcgagccgcggttcgccgagccggctgaagcccgattctgcctgaccaccgacgcggtactggtggccaccggacgtacgccgaacgtcgagggactgcatcttgaggcggctggcgtggagctcaccgaacgcggtgccgtgaaagtcgacgagcttctgcgcaccacagcagccgacatttgggctctgggcgatgtgaacggcggcccgcagcacacgtacatttcgctggatgactatcgcgtggtgtggtcgcagctcaatggttccgaccgtccgtacacggtgaaggaccgcaagcatgtgccgtcgagcacattcctcgccacgccttactcgcgcgtgggattgaatgagcgcgaggcgaaggcggctggattggattatgtggtcaagcgattgccggtggccgctgtgccgaaggcccaggtaatgcggcgaccggatggtctgatgaaggcgattgtggaacgcaatactggccgcattctgggtgcgatgctgctttccgtcgagtcgcacgaggtgatcaatatcgtcaagttggcgatggatcttgacgcgccggccagcacgttgcgcgatatggtgttcacgcatccgacgattgccgaggcactgaacgacttgttcgcgtagtttgttcgcatagcacgcccgcgcagcatgacccgcgtagcgcagcccgcaacagactcccctaatgcgcgcgaaggtcctcatcgacgtaaaccgatgaggaccttcgcgctgtcgtcatgatccgtacgtgacaacaatcacgtccgaaccagccgttacttcaagccgagcttacggtccagaatgtcggaggcatccaatcctaagcggcgtcggatgaaccagccaagaccgagcggcaggccgggagccaaggccatgccgcctggaccgagtgccacggttttggagttgcctgcgataagcatggtgcccttggatgcggccgtggaggtcgaaccatcgctgtccgcctctggtttgaggatttcgatgttgccgtcactggttttgtacagtcccttattctcattccagataccggatgcgccattgttgccggcctcacccgcagagaggaaatgtcttgtttttcttgtgagcgctcacctattcacgcgcgatggcatgtttttcaagcaaagtcaataggtgtgatgttattcacactcttcattacgttgttttgcctcgcactgggcaaccccacttcagcaagagattgcacagcttgcgttagggtggagaacatgactatcacagtatccacagatgggtccgcattagggaatccaaacgggccaatgggctgggcctgggccgatcatgagcagaacgccggcggcaagcccggccataagcacgacgaccatggttatgatgcgggcggcgcgactaacggcaccaatcagattggtgagctgtgcgcagtgctggaagctttgcgagcgcacccgggccctgagccattgctcatcgaatcggattcgcagtacgccatcaattgctcgaccaagtgggtcaaaggctggaagaagaacggctggaaaaattcgcagaaaaagcctgtgaagaacaaagagcttattcaggcgatcgaccgtgagatctcacaacgccctggcccggtggatttccgatgggtcaaaggtcacgccggcaacgagggcaatgagttggtcgatgaactggcacgcacctatgcgggcgattgccgttcgggtgcgcgcgacggctatctgccgattgaaggctggcagtcgctactgggctccgaatacgcacatggcaccgatgtgcctccagacgtgcagttggtgctggatggcaaggcggatgcggcaagtttgcgcaagccggctgcggcgacggattcgacggatgccacaaggccagagaccaagtcttcgtcacccttagcgacacaatcagcgcaacctgtacaatcagcgcaccccgtacaccccgcaaagccaagcggactgacggtatccggtacgctgaccttctcccccgcgccgaaaacgagcccgtatttcaacgggcagccgatgccgatcaaaggcagcatcgaaatcgaaggctatgtggacggcgacggcaacctgaccatcgccaacgcaccattcgtacgacactaacacccaaacacacgaatatgtaccgcaatcggacacgatgacacaaaatcgctcattcgcgttaggataggagataaggcttcacgccgttgatccatgcggcggaggcaaggatggcaaaggagaaaccatggataaggcacagcaggatgcgctgaagaaggcggccggcatcgaagccgccaagctcgttgaaaacggcatgatcgcaggcctcggcactggttcgaccgtgaagttcctggtggacgagctcggccgccgtcatcaggaggaaggtcttgagttcactggcgtaaccacgtctcgccgcacgcaggtccaggctgaaagctacggcatcaagatcgtggacatcgacgacgtggaccacatcgacgtgaccattgacggcgccgacgaagtcgacaagaacttcaacggtatcaagggcggtggcgctgctctgctgtgggagaagatcgtggccaccaactccaaccagatcgtgtggattgtggacgagtccaaggttgtggacaccatcggcaagttcccgctgccggtcgaggtcattccgttcggcgctggccacgtcatcaagaagttcgaggaccgcggctacaagccggtgcttcgtcttgacgccgatggcaaggaagtgcgcaccgacgagaacaacttcgtggtggacctgcacctggagcgcatcgatcacccgcaggagctggccgaagacctcatcaacacggtcggcgtggtggagcacggcctgttcctcaacatggtcgacaaggtcatcgtcggcgacccgaacggcccgcgcgtgttgatcaacgccaacaagtgatcgtctcacatcactgaacttttccaagcccgcatctgtacatcgcaggtgcgggctttactgttgcccgaacaaggcaaagagccaagcaaaagagaaaccccgcgaccataacgatcacggggtttctaatgccttgattgcaggtaagactacttacgctggtggcgggtcttacgcagcagtttgcggtgcttcttcttgctcatccgcttgcggcgcttcttgatgacagaacccatctgaagcctccatttcgattaatcgtaaaagttgcaacttgcaccataatacacgtgttgccagacagaggaaaccagtatgttgtcgatagtccgcatatgccctgaacgcagttggggcatccacatcagcaatgtggatgccccaacgttcataagtttgtgcagcagctgacagccgatactagatactacatcgggaacttctggtagaagcgatcgaccgcttccttggtgccggtagcttggaagaccacggtatcgttctgccagatggcagcggcgttcttgctgttggaggcatcggccttcaccacgtacgcgcccgtgacgttgccggaaaccttgacgttgccggatgccgactcatcgccggtctgcgcagcgaccaacgcatcgtactgggtcttggcattgtccgccgacgaccactgcgcggcgaccagcgtgacatccttggcggcatcaccagtggagtaggtcagagtgtactcctcgagcggcgacgcggaattccacgtcgtggaggcatccgccttggtacgcgcgtaattcagcacgctgtccggcatggccttcaacagctcactggcatcatccggcaaagctgtggcgtcgatggtcggcttgatcggctcggatgattcggttttctgctggctgttttgggtggtagtggaggtgccatcattcttctggatggcccaacccggccacacaaaggccgaaagcactgccaggataatcacaacagctgcggcaaccaccactgcaatcaacttgccatgggattgcgtggtcgaggagttctcactattagtcatgccccgattctctcacagccgcgtgacgctaggcggccgtaattttagtcgttgtgcgcaagccgcgtgaaactcttgtgaacggtaaaaatttaccgtccgctggtgtttgggttagtgtgagaccatggcgaaatcaagtgtgcagtatgtatgttccgaatgcggttggaacgggccgaagtggtacggccgttgccccgagtgtggtcagtggggcacggtcgaggaatttcacgaggctcggccggcggcaggctctcgcacggccgctcccggccgaacatcacgcacgcagtcggttacggttgccaacaacgccagatctgcagcccgtccgattaccgaagtgggcacggaaagcgtcgagcggctcggtaccgggttttccgaattcgaccgtgtgctcggcggtggcgtggtgccgggttcagtaacgctgatagcgggcgaaccgggtatcggcaagtcgacattgctgttgcagacggccggcaatatcgcgcgcgttgtggcgggagacagtacgttccgaggggcaggtcagcggtctgcccaacagtcgggccgggcgcagggcaacgcatcgaacacggtgccgatgcggggcaacgcatcatcaacacacgccaacaccgtgctgtacatttccggcgaggaatcacaggcgcaggttcgtttgcgcgcttcccgcatcaatgcggtggagccgaacttgttactggcctccaccaccgacctgtccacagtattggggctgatcgaacagaacaagccggccttggccattgtggattcggcgcagaccatcgtctcgcaggaggtcgatggcatttccggcggttcgactcaggtgcgcgaagtggcaagcgcgctgatagataccgctaagacacttgacattccagtatttctggttggtcatgtgaccaaggatggttcgattgcaggcccgcgcacattggagcatctggtcgatgtggtctgccaattcgaaggcgacagcgagactgcgctgagaatgctgcgagcggtgaagaatcgttttggcccgaccgatgaagtcggctgtttcgacatgagcggtgaaggcatcgaagaggtcaccgatcccgccggattgttcctgtctggagacggccctgatgcggccaacgcggcacccgtggaaggcacctgcgtgacgttcacattggatgggcatcgcagtctgcctatcgaagtacaggctctggtcaccacgtcggtgctgcccacaccccgtcgtgcggtcaatggcgtggaccccagccgtatcgccatgctggtcgcggtgctctaccgtcacagcaagctcaacctgctgtccaacgacctgtatatctccactattgccgggggccaggccaaggagcccggttccgacttggcgatagtggcggcactggcgagcgccgccacgtcaaaacccattgcgcgagccacgtgcgccattggtgagatttccctgaccggtcaggtgcgcccggtaccgcgtatggaatatcgccttcgcgaggccgcacgcctcggcttcaccacggcggtcattcctcctctgcgcaagccggtgcatgtcgagggacttcagctggtggagtccaacacattgtccgacgccttagacgccttgggagtgcgtaaatagccctgagatatgcctcaggcggtaagacgcttggtctcctcgacgttgcgcttgagttcgtcgacgaggtggtcggggccatcaaacttgacctgcgggcgcaggaaaccgacgaattcgacgcgaaccttgtggtcgtacaggtcgatccattcttcagtgatgcagtaggcctccaccacacgctcattaaggccggttttttcactgaaggtgggcttggtgccaatggagatggcggcgggccaacggttttcaccatctaccagccaaccggcatagacgccgtcgaccggaatgtagcctgcaatgtcggagccaagattggcggtggggaatccgatggtgcggccacgctcctcaccgtgcaccacttcgccctcgatggagtgcggagcacccagaatggcgttggcgtcctggattcggccatgagccagcaggtagcgcacattggtggagctccatgcgcgcattgccttggcctggttcttcttgctccatgcgcggcgctcggccttggtggcattggccagcgggtcgacgggctctccccattcgctcggggcttccggcttgaaatcgcgcggaatacgcacttcacccgggccacggtcatcgaccacatcaagttcgaatacaccggtggcggcggcaagattggcgatatgcttcacatcaccttctcgacccttgcccatggcggcatcctgcccaaggaccaacgtgcgcatacccagcttgccggtgagtcggccaaggaagaaaatgtatgacatagctgcgaaggccagcgtgtagtgcaccaccagcacgtggtccacgccgaactgttccatgcggtgcagtcgatcatccacactggtcaaggcttcggcatccacgttctgcaccgcgggttcttcgccatggtgcgagatgacccagccgtgcacgaatgcggggcgcggatcaaacagaatcaccacggaaaaagcatcatgctggtgcgcgagttccaccacacgcttgatcaccgcctgatgacccaagtgcatgccatcaaatgcgcccaatgtcaccacggccttcttatcgttactgaacgagggccattcaatcgaaccttcggcgtcaggggtcaggtgcgtgatatccatcagtgtgctgttccttttatccgtgcgatgttattcatgcaatatagacgttgttgtgcgcggcctgtatcaagctgcacttttcaccgcgtctactttacgcgagggggaatacggtgaccggcttggcctgatgagcgtttgcacgctcgataatcgccgccacatcatgcgtttgcggcacaatggcggcagtgggctcgctgattgtacgctcaatacggcggccgaagcgtaattcgctggcctcctcaggagtgatgtcaagcgccggcatcgcacctcgagcggcctgttccatggtaagggcatggtcaagcagccagttgcggcgctcgtcaccggcaagaccttcaggagtgtccaatacgcacttgttgcgcgtgacggtttgcccttcccgattagtgaacgtcttctgatcggtatgtacggtgacggtatgggttcgcgtgtcaagcatcgcctcaggagcgataagtccgctggcatcgtccggcaacgcgaatcggccgactcgcgtacgacgcaaacgggtcaggtatccgccgacgccaagttcgttgccgaggtcgcgggcgagcgcgcggatataggtgcccgctgaacagctgatccgcacgtcaacatcaagtgtgggaatcgctcccgtgttcgcgtcttcccgcaatggttcagcggcctgctcccctgctacgaatccgctgcggatatccagcacggtgaattcgctgatggtgaccgggcggggtttgagttccacatccttgccttcgcgagccaagtcgtaggcacgctggccgttgattttgatggcggagaacgtattggggacttgttcgatatcgccggtgaaattggtggcgatggtgcgtgtgagcaggtcttgccatgaggcagttggtaacgccgttggttcgccgctctggccaccctcagtcagctgcgctgatagcgtttgccagcgggagcgggcttcgtcatcgacaagcacctcgccttcggcatcgtcggtagtggtgcgcaggccgaggcgtatggtggcctcgtaggttttgtcatgcgccacgatggcgttgagcagtcgtgtggcgtggccgaaggcgatgaccagcgtgccagtggccatggggtcaagggtgccggcgtgaccgaccttcttgatgtgcaacgcgccgcgcacggcggcgacggcgtcgaagctggtcacgccttgcggcttgtcgatgatgagcagaccgctgggtgttgtatgaagcacactactcctcgtcagagtcgtcttcgaagtcgtcgctgggctcgtcgtcatgcttgtacggatcggcgtcgccggcgtactgggcggtggcgcgagcacgggcgagttcttcatcacgcttcttggccacggcgagtatgtcttcgatctcgtgagcctcgccgggcacttcatcgaacacgaattggagctgcggagtcaggcgcaggccagccttgtggcccaccagagaacgcaggtggcccttggcctgatcgagtgcctgctgggcgcgcttgcgttcgccttcctcgtggccttcgtggccgagctgggtccagtagaccttggcgatctgcaaatcgttggtcacacgaacttcggtgacggtgatgctggcgagtcgcttgtcatgcagttcgcgctcaatggaggaggcgacgacacgctgaatcaaggccgcaatacgtgcggcgcgcgggttggttcctgccataggaatttccttttctagacttgagccccctctgacgaggggctgccgaacgcagtgaggctgggggagagaaaatcatggaactaccatgtctctcccccagtcagtctgcggctgacagccccctcgtcagagggggcttaacaatgactacttgcgctcgacttcccgcatctcgaaggtctcgatgatgtcgccgagttcaatgtcgttgaaggtgccgaggttgataccagcctcgtagccttccttgacggactgaacgtcgtccttgaagcgacgcagcgaggagatctcgaggtcgttgaccgtggccacgccgttgcgcaggatacggcacttcgtaccacgcttgacctcgccgtcctgcaccataacgccggcgatgttgccgaacttggaggagcggaagatctcgcggatctcggagtgagaggtgacgacctcttcgtattccggcttgagcatgcccttgagggatgcctcgatgtcttcgatcgcacggtagatgaccgagtagtacttgatctccacgccctcgcgctcggcgaggtccgcgacctgacggttcggacgcacgttgaaaccgatgataacggccttgtcgaccgtggccaggttgacatcattctgggtgatcgcaccgacgccgcggtggatgacctggatgccgacctcgtcggatacctcgatcttcatcaaggaatcctcgagcgcctcgacagaaccggacgaatcgcccttgatgacaatattgagcatgtcgatctcggactcggcgaacttcttcttgaagtcctcgagggagacgaccttgcgacgcttggccagctgggcggcacgctcggtggcctgacgcttctcggcaatctggcgagcggcacgatcatcggaggcgaccaggaagaggtcaccggcggtgggcacggaggtcaagcccagcacctgaacaggtgtggacggaccggccgcttccatcggctgaccgttctcgtcgagcatggcacgcacgcggccgtacgaagtgccggccacgatggcatcgcccacgtggagcgtaccctgctgaaccagcacagtggccacggcaccacgacccttgtcgagtcgggcttcgacggtggcaccacgggcgtccatgtcggggttggcgcggaggtccagctcagcgtcagccgtgagcagcacggcttcgagcagcttgtcgacgtgcaggttctgcttggcggagatgtcgacgaacatggtgtcgccaccatactcttcagggaccaagccgaactcggtgagctggccgcggaccttctccgggttggcaccgggcacatcgatcttgttgacggccacgacgatcggcaccttggcggcctgagcgtggttgatggcctcaacggtctggggcatcacaccatcgtcggcggcgaccacgaggatcgcgacgtcagtgagctcggcaccacgggcacgcatggcggtgaacgcctcgtggccaggggtatcgaggaaggtgatcttgcgcggttcgccttcaaggttcacggtgacctggtaggcaccgatgcgctgggtaatgccgccggcctcacgtgcgatgacgttggtcttgcggatggtatccagcagtcgtgtcttaccgtggtcgacgtggcccatgacggtaacgaccggcgggcgaggcttgagatcctcgtcatcctgcagttcttcctcgtcaaggttgatgtcgaactgctggagcagttccttgtcttcctcttctgcggagacgagctggatgttccagccgatctcttcgcccagaatctggaaggtctcctcatccaaggactgggtggcggtagccatctgacccaggtggaagagcacggtgaccagcgcggcctggttgacgttgatcttctccgccaaatcggccagggacgcgccctgacgcagacggatggtctggccgttgccgttggggatgcgaacgccgccgatggtcggtgctttcagctcctcatactcatggcgctttgccagacggttcttacgggcctttgaggacttgccgccctgacgtccgaatgcgcctgcggcaccgccgcgaccgccgcgaccgccgccacgtgcgggaccgttgctcggtgtaccgccaccctggaagttattgccgccgccttggcccccacggaagccgccgcgtgcgccgccctgaccggcaccctgggagccgccgccctgacccggacggttgtggccccactggccgggacgcggaccgccctgaccaccttggcccggacgaccgccacggaagccgcggccctgcccctggccttggccgggacggcccggacgaccgccacgaccgttatcagcagtcggacgagccatcggatgcggacgcggaatatcacccggcgtcggggtgtgcataccctgcttgcgggagaacgggttgttgcccgggcgcgggccctgagcgtgcgggcgcggaatcgcatttgaagcggcattgccgccattggcaccggcgccgccctgagcgtgcgggcgcggagccgaagcattgccgcggttgttctggtgctgaaccggctggctattgttcggacggccctggttgttacgacgatcgttgttacggcgatcgttcgggcgactctgacgaccgttctcacggccttcgcgattatcgcgaccattctcacggttgtcgttctgaccgtggcgaccgggggtcggcatgccggggcgtgcgccgccctgcggacgcggtgtcggtgcacccggagtcggagcctgctgatgtgccgaggcaggcgatgcctgacgtgcgggagcggccggagtcggtgcggaagatgaagtggaagccggggccgaaggtgcggccgggcggcgctgctgcacgggcttggaatcgcccttggcgttgtccttggcgaactctgccttcagacgccgggctaccggcggttcaatcgtagaagaagcggacttgacgaattctcccatgtccttaagcttctcaagcacggttttgctatcgacattcaaaaccttagccagttcgtatacgcgtggtttcgccactaattactcctattctgtgaccacgcgcgtgcatgggcgtggtcagttggtgatgacggcaagcctaccctgtctcatcgtgcgaccatgatcgtgttacctcgtctctggtgtgggcgatttcgcgcacactgcgccagcccacatacgccaatcaagcatactcatagcgctggatagcgtagacgcagcgagccgcgccattgctgacgcggctcgtatcaggaaataatgcgccctgaagatcattcgccttcgagcccggcggcctattcggcttccggagcagcagcctcggccgcagcctgggcggccttttcggcggcgaccttcttggcatgggcctcggcggattcgatgccgatcttccagccggtcagcttggctgccagtcgtgcgttctggccttccttgccgatggccagggacagctggtcgtcgtggatgaaggcgatggcggtcttgttcttctcgctgatcacctgcacgccggtggccacagccggggacagcgcggctgccacgaacttggccggatcgtcggagtagtcgacgatgtcgatcttctccgggccaaggttctccataacggcacgcacgcgagcgccgccggggccgatcagcgcgcccttcgggttcacgccatcggtgttggccttgaccgcgatcttggtgcgggcgccggcctcacgagcgatggccatgatggacacggcaccggagaccagttccggcacttcgcgctcgaacagcttgcggaccagctccgggtgggagcgggacaccacgatttccgggcccttgatgccacgggccacgttcaccacgtacacgcggatgcgttcgccgtggcggtaacgttcgccgggcacctgctcacggcgaggcagaatggcttcgacatcgcccatcgcgacatgcacgttggaggggtcggaagcatcctgctgaatgatgccggtgatgagcttgcccttttggccggagaacgcaccgaataccttctcatcttcggcgcggcggaacagctgggtgatgacctggcgtgcggtggctgcggcgagacggccgaagtcacgcggggtgtcatcgtattcctcgcccagcttgggagcggggtaagggttgtcttcggtgggttcgaccggaatttcgtcggcggcccacacggtgaagttgccggaacgttcgtcaagctccacgcgcgcgtgcttggcggcgtgcggggtcttgaggtaggcgaggcgcagggcctctgccagcgcatcatccagggtttcggggtcgattccttgctcggcggcgagcttgtgtattcctgtcaggtccagttccatcgatccgtacctcctatgaagttatgtggcgcatggcctatgagtggtcacagttagctattagtgtatgtttccatgcagacacgcttctcttcaggacggtttacccggcgcttggcatccgtactatgcgcgagcgcgatgctgtgttcgctttcggcgtgttcgatgccgcgattggccggacgggccgaggcggaagctcaaatgaccccttgcgagaaagcgatgacgttggcgaactacgctacccatccggctgaaggcacaccgttattagagcagtatgccaccggtctggccgctcccctggcttggattgacgttgccgggtattgttcgggtcgttttgccgagggaacgttacgtgacgcgcagaccaagcaatggatggcttttctggccgataaattcgggcagtccgcgcctgaggtgacgccggcgcgtcttgatggcgtcacgtccgccaacgttgaccgatcggtattggatgcgatggccgtggccgaggatcgcgccggattcgctatcgaggtcttggccgcacgaggacagaccgctggggctacgttggcgttgagcgatatgcataagaccgccgggcagcagttggttgcgctggcgaacggcaattttgatgattccggcgcacaatccagttcttccggccaaagcgacccccgccaaaaggtctatgccatcgaccaactactggccaaccccaccgccatcgccgacaaggcaagtggccaaaccgtaccgaccgccgccgccatcgaaatggactgcgcccgcgcgcagatcaaggccgtgaccgaatcgaaatcttccaccgagagcgatatgctgctcatcctcgccgcactggccgccaagcacgcctacaccgcgttccaacttggctacccagcgactgacgccgcattgttcgagtagacacacactcctcacgaagccgatgcgaacttgttggatgctagtgggcaagtcgagttgaggcacgttccaccaatgtgaaatcggtggtgtacgtacgggccgggcctgagtatccttcgatgcggtcgataagcatgtcaacggcatgcttggcataatcgtcgatatgaggatcgatggtggtcagcgccggcaccgagtactcggcttccggcacgttatcgaagccgaccacttgtacatcgtcaggtacatgcaaaccacatcgttgcaattcatgaattgcgcctaaagcaatggcatcattgagacacactacaacatccgggcatgggagcttgtctagcatagcttttgtcacgcgcataccttcacgctgattcatgctttctgccggaatcacataccgccaattcaccgataatccgcgctcttcaaatgccttcacatatccttgggcgcgtaacgcctgggtcccttccgtctgacgacgcagcactgcctcatccaccagttcaggaagaacacccatcagagcaaccgtttgggcaccttcatccaaaaatcttcctacaaccgtggagatggattcaatgttgggcatggtgatccaatcgcttttcccgtaggccagatggtctccggtcgttacaatcggatatggcggctccagaacggccccttcatccgcgagcggcgacattacgaacagaatccatccttccgcccctaaacgataggactcgtcaacgctggcaaccaacccttcaccgtcggaaccatatgtgttgatgactacaccgtaatggcgttcttttgcgtattcaatgaccttgtcagtgaaaaaaggaacgaacggctgcgagaaatcgaagatgttgagtccaataagctttgtgccgccagatcgcattgcacgcgccgaaatattgacggtatatccaagcttacgcatcacctcttccacacggcgacgtgtatccggtctcatactgccagtgtcattcagcacattggaaaccgtcttgatggagacgttcgcctcacgcgccacgtccttgatagttacgcggtttcccattgttcgaatccatttctgcttattacatgacacaccttcaacagcgtcattatgttcttattatggtaagtcacagtcgggtcgagcatctcctcctcatatcggaatcatctacccctcaacctcagaattcagccaaggagctttcctccgttggaccccatgcaccattaggcaaatatccttctgacaatgctgcaggacgatcgaacgtagaggttaaactttctggttgaagaaacgcacgcacgccatccgaacaagggactttctgaccaccggctttcaacctagctttttacatacccgtcttttctccttattcctttgttgggtatcgaattgttccagtcgatgtgaatgacggcattgtcttcctctgactggtatgccacattacattagtggcgaatccgaacctctctttctgcaatccgggcatgttgatgattgtttgggtattgcttggtggttgtacagggcacagcaaccataagagactgcgccctgtcatgcgccaccgtcactcgaatcacttcacgtgcacggcggtccaggagaccggcggcaaggtcacacgcacagtgccggtatcgacgtcggacgtgatggtggtgttggggtgcagaacgactcggttctggtcttccagcgtgttttttgccagcagatcatcctcgtgcagggtttgcgcctcgaccgcggaaagtgcgaatccttccggcagcttgatggcaaagtcattggccgcttccatggagcgattgaccacaaacacgctgatcgtaccgtcctcaccacgcacggctacggaattgatcgtcggcacttcaccgtatttgtcggtttcatacgttccggaagccagtttcggttcaagcaccgtgccgcccttggcgagctttgcggtcagcgagaacggatagaacgtggtctgacgccacgccgggccgcccggttcggtcataatcggcgcaattacgttgaccaactgggccaggctggcggcgtgcacgcggtcggcgttcttgagcagggtaatcatcagatcaccgaacaccacggcgtcggcggcgctgtacacatcctcgagcaggcgcggggcaaccggccaattgccgatgccttccggattcttgctcggctcttcgttgagataccagacattccattcatcgaacgagatgaacacgtcgtgcttgctcttcagccgggccttggttgcatcgatggcggcggcgacatcgttgatgaaaccgtccatatcgacgcccgaggcaaggaagctcttcatgtcacgggtgccatcaggctgaagttccggatggtagtacgcatggcaggagacgaagttgacgttgtcaaacgtcttctcaagtacggtttcttcccacttgccgaaggtgtccatcacgtggctggatgaaccacagaccaccagttcaacgttcggatcgatggcgcgcatacctgccgccaccgaggccgccaaggtgccgtaatcctcggcggacttgtgaccggtctgccacgggccatccatctcattgcccaagcaccacatcttgatgccgaacggctgatcggcaccattggcgcgacgctcctcggagagcttggtgccgccgggaatattcgcgtattccaacaggtcgagggcctcttcaagaccacgggtacccagatttacggcttccatcagctcgttgccgccggttttttccagccatttcgccatttcgtgcagaccaaactgattggtctcggtggaatgccatgccaagtccaggcgacgcggccgctcatcacgaggaccaacgccatcctcccagcgatagccggaaacgaaattgccgccaggatagcgaatcgtggtagcgccgagttccttgaccagttcgatgacgtccttgcggaaaccgtcttcatcggcttcggggtggcccggctcatagatgccgtcgtatacgcagcgacccagatgctccacgaacgacccgaacagtctgtcgttgaccggagctacttcaaagtcattatcgacgacgagtcgagattcctccagctcccccggtttattgtcgtgcgaatgctcggacatgtgctctcctttaatcgttgtcttcaataccgcaagacaacgttgtgctaaataccaaaagcaatcggcccatcttcttggttcacctgttttgcggcatcgccaatcagcggtgaatgtgcgttctggatatttaatacaaccttgtacttctgttgatatcgataatacgatggttgtacttagtacgcaagccccgctgagtacaacgttatccttttcgctattttccacccgacacgccgtatacgatacagcacaggagcgaatacggacgttcgtatcaaaaacaaaaagggttccgggacaaacccggaaccctaaaggcggataaggcgagattcgaactcgcggaggctttcacctcacacgctttcgaggcgtgctccttagaccgctcggacacttatccatgctgccaaaatggcaacttgttcattatgccacattctgccgacctggcaaatcggagtttcgctgagctcgattcggcgtgggataatgcgattttgtgtgagattgcgatgggtcagacgatgagccgattaacagtccgaattggtcaactgcgaaaatccgaattcttcaactaccaaaatccgaatattggtggtggtagaagcggtgacggggccactctgcattgagtggtctctccctcggtcagccttacggctgacagctcgaacgcaattaaggacagctttccagctgccattttatttgctcactgtcgttcgccttcgcctaaaaacgcctccggcgttttcttcacggctcagctcatcagagggggcttggaattttatttatgccacctgttcgtggacggaggcgttgacccattgggactgctggacgttgtatccagagaagatgccgatgtcgagcatgcagtcgcggtaatcgcggccgtgggcgatggtgatgtagctgtcgtccaccaatcggttatgcgtgggatccagtccgacccatcggccatcctgatacacctcgacccaagcatgggtcgcgccctctcccccaagcaaaccggcaatgtagcgcgcggtcaatcccacatgccggcacacggacagcatcacgtgcgcataatcctggcatacgcccttgcgctgagccaaggcctgttcggcggtggtgcgaatcgtggtggaaccgggcgtatacacaaacgccttgtagacctcatccatcacttcggcagcctgctgcaccggagtggcgtcggaaggcagcgccgccaagcgttcgcggcatacggcaatcatcgcctccacgttcgggccgggaatggtgagcgctgaattgaatcggtacagcggtttataggcttccttatggatatgcgcattgtccacgaaggcgatgccggtcaccgagtagctgaatatgtcgtgcggctcagggatgaatccggtcatcaccacggagtcaaaggagtcgatggtggtttcgagttcggtttcgggctgaatcttcacttccacgtcaatcacctgttggcgagggccagtggagggaatacagcgaagctggaacctgtgatcggtgaccggtgcgctgaaggacagcctcatctcatagtcgaacacgagttttttcacaacgtctcctgcacttacacacgagccggcaaccggcatattctcgggataacaacactacagccatggctgaggtatggtccgtgcgctcacagcccacgcatatattccggcaatctgctgatatgcacaggccggcactcgggcgcacggttttttcgccataccaccatagcatttgaacccgtcagggtgtcaggtcgggatcagggacgcttggcgtccatgttcatggagctcagggaccccatgtccttgatggccagcgcgctgacacggccggagtagtcgtcgagatacttcttgagcaggtcggcgatctcctggtagccgcgagacggcagctgaccgaccagccagctcagcccatcggcgaagcaactgggcagcggcatgccgtccaaggtcatcgaataggcggcgagcttcttgagcggcgcttccatctcctccatcgtcaaaccgaagcgcgtgtacaggtcgatgcgttccagatacttgccgatgaagatgaacgccttcagcgtggggtcgaccggcgaattctcgatgccgccccagaaggcgagcatgtcatcggtaatatcgtgctgcttgtagatgtcctcggcatcggccgcgtatttggcggcatcggtgatattggtcatcgccaactccacgtactgcagcagacgcgagctcaattccgggcgcagaatcacggcgttgttgaatgcggaggttacggccgaccgcaccgaatcaggattggacccgtcatacaggaagctgttcacgaacccgtcgaagtcctcgaaatcttcgggcaggtcgagtgcgtgagcgaacggacggaaggcgtccacatcggtgtccatcacacgatcgtagaacgggaagaactggttcagcgtggtgaaggcgcgctcggtgtaccgacccagccaatacaggttgtctgccttggaagcggtgaccagagacaacgagtggcggcgggactggctcagcaggttcgccacctgcacttcagcaccgtattcatgctccacgccggattcgggtgccaacacccacgtatccttgaatccgccaccctgcgacgagttgacaatcatctggccgggcaccgacgagtatcgagtcaagcccgaataccacacatgcgtattcttgccggtgaccacgaaggcacgcaaatcgcacttgcgaggcgacatctcaccggtcttcgggtccaccacatcgatatcacggaactgaatcacctcttgggcaatgaatcgacgcggctcctccttgatccggttggcgagctcctcacgtgcggcggcatccagcgacgaaccaaacaccacgccgtaaccgccggcttcggccacatccttgatgaccagctcgcccatccgattcaggacttccttgcggtcggcctcgaacatcggcatgtacgtgggcgcgttgttgagaatcggttcctcgccgagatagtacttgatcatctgcggcacgaagtagtagatggccttgtcatcggccgcgccgttgcccggcgcgttgacgatggccacgttgcccgcgcggtaggcggacaggataccgggcacaccgatcaccgaatcaggattgaaggcgaacgggtcgaggaattcgtcggacaggcggcggtagaccacgcccacacggtggcgtttgccggcgtagtcgaggaagtagaccttgttgtccaccacttcgaggtcttcggggaaggccaacgccgcaccggttttctccgccagataggcgtgctcgaagaacgcggaattgtagcggccgggagtcagtaccacggcgatgccctcggtggagacaaagtccatggctttgcgcaacaggcgcgggtattcgcgattatcgcgaatacgaacgtcgcggaacaggcgcggggagatgcggcgctcgatgtcgcgcacgaacagcgggtagctggcacccgagggaatacgcaggttgtcttccagcacccaccagcggccgtcctcgccttggaccaggtcctcgccggcgatgtgagcaaaaatgccgccgggaggggtcacgccgttgacctgcgggaagtagccggccgaggtgtatacgtattcctccggcaccacgccgtcatggatgatggccttgtcggagtagatgtccttcagataggcgttcagggcgttgacgcgctgcttcaagcccttctccaattcgtcgtattcgtcggattcgataatgcgcggaacagggtcgtacgggaacagccggtcatggtattcgccgttcttgtagatgccgaaacgcacaccgttgcgggacagctctcgattgatcgcttcgcgacggtttaccagttcatgggccagtctgcgtgctgcggattcgatcatcgtgcctgctccttgctgtggcggcttctgtggcttcaagcggttaggcgtgttgagcgcacgctgacgccgcaagccgtaaccgggtttgatggtttcaacctaaggcgggcccccgatgtctatttagaagtgcaacacccttgttggtcctgtaattctaacagttcgtcggcgaacgcctcggcgggcgtccggtagtccagcacgcgcatggggcggttgttgatctcgtcgacgatctccctgacctcctttgccatgtccatccggatctcgcagcgtttgggcagataccggcggatcatgccgttgcggttctcgttgcttccccgctgccagctggagtacgggtcggcgaagtacgtggccatgcccagcccgtcgcgcagcctttcgtggtgggcgaactcggtgccgttgtcgtgcgtgacgctgacgcgcgcgccggccggcagcggcgagaacatgtccagctgcgccccgacgctctcgccggcggtcttgtccggaacgatgcgggccatgaggaacctggtcctcctctccacctcggtgtgcaggttgcatcccactccgatgacgctgtcggcctcccaatggccgaacgcgctcctgccgtcggcctccggcgggcgttcggagatgggcactcggccgggaatcgggaagcgcgacgtcctcctgccgccgtgcctgcggcgccgcctgtgccctcgcggcaggcaccgcgcccagcgttcccgaagcggcctgctggagtagacccatcggtagatggtctccgggcacacgcgcatgagcgcatcgtccggccacaggacgcgcagcctgccgctgataagcagcggcgaccagccgcggcccagccattcggccacctgcgcccacaggcggtcgtgcgacagccggtagggctttcgtggcttggatctcctgcggtcggccttgcgctgcgcgggcccggcgatgtagtagcggccggtccatggccccgccttcagtcttttcggccggtacgggcggtacgactcgttctcgttggacgggaaccatgtgttgcgcttgatctcccggctgatgctggacgggctgcggcccagcatcgcgccgatcccgcgtatgctggcgccgttgcctacctcgatctggatgacctggcgttcctcttccgacaggtgcgaatatacttctcccataggtgcgacatcccttcggactggttttctaggcaatttccaatctaacgggtgttgcactttcatttagacaacggggcccgtttcaacaaacgcgcgagaatgttacaggcaggtcacttcgccggccgcgtgcatcttgacgaccgcactcgtctcgccgaccacacgcatcttgccgaccgcacgcatcttgccgaccgcacgcatcttgccgaccgcactcatctcgccgaccacactcgttacaatgaatggctatgacacgactgcgcattgacttggcctacgacggcggcggattctatggctgggccaaacagcccaatcttcgtacggtgcaaggcaccattgaagatgcgctgcacaaggtgctgcgggtgccggccgatgacgcggccgaaccgttacgcttgacggtggctggacgcaccgacaccggtgtgcacgcctcccaccaagtggcgcatctggatgtatccgatgaggtactgaatcgctgcgtaggtcacatgaccattccggtcaccgaggcgctgactcgcagactcaaggctgtgctgcctccggacatcgtcattcatggcattgccgtagctccggtcggcttcgatgccaggttctccgcattggagcgcacttatgtgtatcgggtcgccgatcgttcgtctgaggtcgacccgcgcctgcgtggatgcgtacttaccgtggatgaagcgctggatctggagcttatgaaccgcgcagcctcattgaccatcggcctgcacgattttggttccttcgccactccgaatccgggaggcactacgatccgtgaagtcaagaccgcctattggcggcgggtgccgatcactcccctagtaccggatgagatggcatcgcatgaagcatatcggactccgtcgctggagtccggcctggtagtgttcacgattgtggcggacgcctttgcccgcaatatggtgcgctccctggtcggctcatgcatcaaagttggttcgggacgcaaatcactggagtggtttgccggcaaaatggccgagccagtacgtgaaggctcaagcgggccgattgcgccgcagggcctgactttggagcatatcgcatatcccgccgatgatcagctggccgcaagagccgaggccattcgggccgtacgtacgttgtagattctatgaaaacaacgcaaaagggctggaacccaaacggattccagccctttcagctagcttagcgaaacgctattcagctcactcggccttctcggcgtcagcggcttcctcagcgggagcctcagcctcagcggcggcggtctcctcgaccggagcctcaacagcctcagcagcctcagtggcctcagcctcaacggccggagcttcttcttcggcaaccttggcggcggcttcagcttccttcacaacagccttcttggcaaccggctcggtgacgagctcgatcacagcggccggagcggcatcgccaacgcgcggagcgatcttgacgatacgggtgtagccaccttcacgctgctccatctgctcggcaatctgggtgaacaggatgtgcaccacggacttgttgcggatgacgcgcatcacgcgacggcgggagtgcagatcaccacgcttggcgaaggtgatcaggcgctctgccagcggacgaaggcgcttggccttcggcagcgtggtggtgatgcggccgttctggaacaggctggtcgccatgtttgccagcatgaggcgctcgtgtgcggggctggaagccagacgcgggcccttcttaggtgtaggcattgggtttactccttatatgtccgttcttcaggcaagcaggtgggcatatgcccgaacatctgcttgcctagtgaacgaacgattggtcaaagaggcagatcactcgtcttccggcgagaagaacgtgccaccttcgagattattggtatcgaaggccatcggcgaggacttgaggctcaggcccaaggtctgcagcttctccttgacctcatcgattgacttcataccgaaattgcggatgtcgagcaggtcctgctcggtgtgggagacaagctcaccgatggtgtggatgccctcgcgcttgaggcagttgtaagaacgctgcgtcaggttgaggtcctcaatcggaacggccatctcggggttggtctcctcggccaccggggccggaccgacctcgacgccttcagcctgggcattgagctcacggcacaggccgaagagctccaccaaggtggaaccggcggaagccaccgcgtcacgcggggagatggcgggcttggtctccacgtccaggatgagcttgtcgaagtccgtgcgctgttccacacgggtggcctcgaccttgtagctcaccttgagtaccggggagtagatggaatcaaccggaatacggccgatctcatcgttgtcctgcttgttcatctgggcaggaacatagccacggccacgctcgacagtgaactcgatctcgagttcgccatcgtcggcgagggtagcgatgtgctgctccgggttggcaatggtgacgccggccggcggggtgatgtccccagccacggcttcgcccttgccgctcttgcgcagatacatgaccacaggctcgtcgtattcgctggtgagcacgatgcccttgatgttcagcaggatctcggtgacgtcttcctggacacctggcagagtggtgaactcatgcagggcaccggaaatacgcacggaggtcacggcagcacccgggatggagctcagcagcgtgcgacgcagcgagttgccgagcgtgtagccgaagccaggctcgagcggctcgatggtgaagcgggagcgctgcggattcagagattcctcggtaagagtcggacgctgtgcaataagcactgtggttatcctttcagcttgaactcggtggtgcactcaccggtcaggcggttttggatggatttggtattgctgagtgctcagacgcgacgacgcttcggaggacgaacgccgttgtgggcttgcggggtgacgtcggtgatggaaccaacctcgaggcccgcagactgcagggaacggatggcggtttcacgaccggaacccgggcccttgacgaacacgtcgaccttcttgacgccgtgttccatcgccttgcgggcggcggactcggcagccataccagcggcgtacggcgtggacttacgggagcccttgaagccgacatcgccaccggacgcccaggacaccacggcgccggacggatcggtgatcgaaatgatcgtgttattgaaagtggacttgatgtgagcctggccgaccgggaccgacttgcggtcgcgacgacggggcttacgagcggcttgcttaggcgctgccattgaccctcgtttcctagtaacgaactttgttgttgacgttcgggcgatgggatgaaaatcatcccgtggcccgaatcatgccaccgactacttggtggccttcttctttccggcgaccgtgcgcttcgggcccttgcgggtacgagcattggtcttggtgcgctggccgcgcacaggaagtcccttacggtgacgctggccttggtagcagttgatctgaatcttgcgacgaatatctgcatcgacttcacgacgcaggtcaccctcgatcttgtagttggcttcgaggtagtcacgcagcgtaatcagctgctcgtcggtgagatccttgacgcggatgtccggactaataccggtcgcggcaagcgtttccttggcacgagtgcgacccacaccgaaaatgtaggtgagggcgatctcgatgcgcttctcattggggatgtcgactccggcaagacgtgccattgcgattccttcttgttgccgtaggtcttgcacccgctcgcccggttacccggcacgggcctacgtacccgtggttcagtgtcgttcccttgcgggaagcactgtgagagagtgccttatttacttagtgccgctggagaatctgctctcagccctgacgctgcttgtggcgcgggttgacgcagatcaccatgacgcggccgtgacggcggatcacgcggcagttttcgcagatcctcttcacgctagggctgaccttcatggttatccttttcttgtgtacctttacttgtaacggtacgtaatgcgtccgcggttcaggtcgtaagggctcatttcgagcacgacacgatcctgcggcagaatacgaatatagttcttacgcattttgccggaaatcgtggcgagcacgatgtgcttgttttcgagttcaacgcggaacatcgcgttaggcagtgcttccacgacctgtccttcgacttcaatcacaccgtcttttgccatgtgcctctagtcctattccgttggatgattactatggcatatccgaagacacaccaactgtcaactatatacgcacatacccctgtacgaacactcggcgtgtcgcacaggggtatggaaacgttgatgtggtatttcggcatcactccggcttgttgcccgggctgccgaacctactactcgaggtggctgatgatacggccgctgatctcgtcgatgtcgccgacgccgttgaccacgacgagcaggccacgggcctcgtagatgtcgagcagcggagcggtttccttctcataggtctccaggcgcttggcgatggcctccggagtgtcgtcagcgcggccctgctcggcggcgcgcttcttcatacgctccagcagcacgtcgcgggcggcttcgagggccaccacgtggtcgagcggagtgtcgaggtcggcgagcatctcgtcgagagcggtgacctgggcggcgttacgcgggtagccgtcgaggatccagccgttcttgcagtcttccttggccagacgatccttgacgatcttgttggtcagggagtccggaaccagctcgcccttgtcggtgtagctcatcgcctcaaggccgagttcggtcttgttcttgatgttgtagcggaagatgtcgccggtggagatggtggggatgttgaagtgttcggcgagcagagcagcctgggtgcccttgcccacgccctgggggcccatgatgagcagacgcatggtggtctccttttatgtcggttattaatacggttttggctcccttggttaagggagccattgagttatatgcggaagaaagattgctccgtcgtggaacagtccactggactgttccactcctcgcgcggccgcctgcccattgcgggcgaccgctgccaagcgggcgtcagccctctttgtggtccacgttttcgaacaggaagccggtgtactggaactgttcggtctgggccttggcctggcgcagggtgtcgaggcccacgcccgcgataatcaggatcgtggtgccaccgaacggcagcttggcgttgaggccgagggccatgatcagcacggtcgggatcagggccacgaacagcaggtagacggcgccgacggtgttgagtcggttcatcacgtaggtcaggtagcggctggtggcgttgccggcgcggatgccggggatgaagccgccgtactgcttcatgttgtccgcggtctcgtccgggttgaacgtgatcgaggtgtagaagaagcagaagaacacgatcatcagcgcgtacagggcgatgtaccacacggatgtggtgttcgccaggttggcgttgatccacttgacccacgactggtcggacttgccgaactgggcgatcagggtcgggatggcgaggatcgaggaggcgaagatcggcgggatgacgccggacatgttgatcttcagcggcaggtaggtggaggagccgccgtacatcttacggccgatcatgcggcgcgtgtactggaccgggacgcggcgctggcacagttcgacgaagtcgacgaagatgaggatgaccacgagcacgcccacgacgatgccgaacttgagccagtcgccgtcggtgccgttggtgccgtagccgatctcccacagctgcggcaggaagccggagcagatggacatgaagatcaagatggacatgccctggccgatgcccttgtcggtcacgagctcggccatccacatgatcaggccggtgccgccggtcatgatgaggaccatgaccacgaggttgaacacggagccgtccgggatgacctggtcgcactggtaattgaacagggcgccggagcgggcggtgaccaggatggtggtggactggagcacggccaggccgatggtcaggtaacgggtgtactgggtgagcttggcctcgccggactggccctccttgtgcagggcctcgaagcgggggatgaccacgcgcagcagctgcaccacgatggacgcggtgatgtacggcatgacgcccagcgcgaagatagacagctggagcatggcgccacccgagaagaggttcaccagtccgatgaagttctcctgggaggcgctgccgatggtggccatgcacttgttcaccacgttgtagtccacgccaggggtcggaatgaacgaaccgatgcggtagacgatgatgatgaacaggacgaagagaatcttcttcctcaactctttggttttcagggcctggattagtgtcctcacctagatttcctcccaatagcgcgccaatcgcgcgaaatacacaaactaacaaacgagcatagtctaaagtgcctacttcggccacttcatgtctcgcgaatgttacctgaattatgctccgtcgtactgaacggggggaagcatactcaaaacgatcattgtgttgagactgcttctctgcactcagaacaacaattttttagaaaagggaacccccgtccacctattggcgggcgggggttgtacagcctattgcgctccccgtaggactaatcagtcctcggaaacggaaccgccggcggcctcgatcttggacttggcggaagccgaaaccttaacacccttgagggtgaaagccacggtggtctcgccgtcgcccagaaccttcaccggagcgttgtcacgaacagcgcccttggcgatcaggtcggccacagcaacctcgccgccctcggggaagagctccacgagacgagcgatgttgatgacctggaactcgaccttgaacgggttcttgaagccacgaagcttcggcaggcgcatgtacagcggcagctggccgccttcaaagcccggacgcacgtggttgcgcttcgtctggcccttggcgccacgaccggcggtcttacccttggagccttcaccgcggcccacacgggtgcggtccttcttggcacccggggcgggcttcaggtcgtgcatctgcaggatttcgttatctgccataatcagtcaacctcctcaacggtgaccaggtgacgcacggcgttcaccagaccacggttggccggggtgtcctcgcggacaacggtcttaccgatcttgttgaggccgagggtcttgacggtggcgcgctgagccggggtacggttcacgatgccgtggtgcagggtaatcttcaggttcttagccatgagtatcactcaccatccttctcttcggcggccttagcggcagcagcctcttcgcgagccttgcgagcctcggcaatgccggcggcgcgggcgcgcagcagagcatcgggagcgacctcgtcgagcgccaggccacgacgggcggcgatctcctcgggctcttcgagctgcttgagggcgtcgacggtagcgcgcaccacgttaacggcggtggcggagcccatcgacttggtcaggacgtcggtgatgcctgcgcattccatgacggcgcgcacggagccaccggcgattacaccggtacccggggcggccggacgcagcaggacggtgccagcagcgtcgtgaccctgaaccgggtgggtgatggtgccgcggacgcgaggcacagagaacatgtgcttcttggcgtccagctggcccttggcgatggcggccgggacttcacgggacttgccgtagccgacacccacggtgccgttgccgtcgccgaccacaaccagtgcggcgaagctgaaggtacggccacccttgtgggtcttggacacacggttgatggtcaccacgcgatcgagcagctcgtcgccgtggttttcttcacgacggttacgacgctcgccacgacggccttcaccgcgctggccacgacgacccttgcggtcctcgttgttggattcggtcgccacagtgttctgagtttcttcagccacttgggtttccttcgtttcgttgtcgctcacagtgcaagacctccctcgcgggcgccatcagcaacggctgcgacgcgaccggtgtacttgttgccaccgcggtcgaacacgactgcggtgatgccggcagccttggccttctcggcgatcagctcgccgaccttcttggcggcctcagtcttggtgccttcgaagccggcgaagtcggcctgaagagtggaggcagacaccagggtaatgcccttggtatcgtcgaccacctgagcaaccatgtgacggttggagcgggtgaccaccaggcgcggacgctcgggggtaccggagatgcgcttgcggatacgcgcgtgacggcgcttgagagctaccttcttgccttttccgagaatagcaacgctcatatcacttaccagcctttccagccttgcgcaggatgcgttcatcggagtacttgatgcccttgcccttgtagggttccggagcgcgcagcttgcggatgttggcggcaacctggcccacgacctgcttgtcggtgccttcgacaaccacgtggttggcgtcggtcaccttcagggtgatgccttcgggcgggttgacggtgatggtgtgggagtagccgaggaagaactcgatgccctggcccttggcgacggcgcggtaaccggtgccgacgatctcaagagtcttggagtagccatcgtgaacacccttgaccatgccggccatgatggaacgagccagaccgtgcttggcacgggtcggacgcaggtcatcagcggcggtcaggacaatctcgttgccttcaacggcagcggtgatgccttccggaaccacgtaggagtcagaacccttagcgcccttggcggagaagttctggccttcaatcttgacttcaacgccagcagggatggcgatggggagcttaccaatatgcgatgccatgtttcagctctcctttctcaccacacgaaggcgacaatttcgccgccaatgcctcggtcgaggcattccttctgagtcagcagtcccgaagaagtcgagatgatggcgatacccaggccaccgagcggcatcggcagggagtcggacttcgcgtaacgacgaaggcccggcttggagatgcgcttgataccctgaatggaacgctcaccgttcggaccgtacttgagggtgacctcaagagtctggccgaccttggcttccttagcggtgaagtccttgatgtagccttcacgcttcaggatctcggcgatgttcgccttgaacttggagtacggcatatccacggtttcgtgcttggccgcgctcgcattacgcagacgcgtaagcatgtctgcgatcggatctgtcattgtcatttgggcttgttgccctttctcgctatggtttccgccgccctcacgcttcttctagaagcgttcgggccgcggaccttcagcgtcgatgtttaccaactggacttcgtaacgccgggcagttcaccgcggtgagccttctcacgaaggcagatgcggcacaggccgaacttgcggtagacggagtggggacgaccgcagacctggcagcgcgtgtaagcgcggaccttgaacttcggcttgccggccgccttgttcttaagagcggtttttgccatatcagttctccttgaaggggaagccgaggtgcttcagcagcgcgtaagcttccttgtcgtccttggtggaggtcaccacagtgatgtccataccgcgcacgtgatcgatcgaatcaggatcgatctcgtggaacatggactgctcggtgagaccaaagttgtagttgccctggccatcgaactggtggccgttgatgccgcggaagtcgcggatacggggcagcgcgagggtcagcagacggtccaggaactcccacatgcggtcgccacgcagggtgacgtacgcaccgatggcctggccttcacgcaggtggaactgcgcgacggacttcttggccttggtgatcttcggcttctggccggtgatcagggtgaggtccttgacggcaccttcgatgagcttggagtcgcgggcagcggcaccaacacccatggagacgacgaccttctggacacgggcaacctgcatcgggttggagtacttgaactccttctcgagctcaggaatgatctgctcgttgtacttgaccttcaagcgcggggtggccggcgcttcgacagtagtatcggtcatgccagctcctttccggacttcttggcgacgcgcacgcgcacggtcttcaccttgccgtcacgcgcctcttccttaacggtgatgccaacgcgggtcggctgcttggtctccgggtcgatgaccatcacgttggagcgatggatcggagcctcagtggagacgatgccagcctgctggccctgctgcgttgcacgcacgtgcttcttgacgatctgcacgccttcgacgattagtcgatcgttggagagcacctgcttgacggtgccttccttgccgcggtccttgccgcggatgaccttgaccaggtcgccgctcttgatcttggctgccatgtcagatcacctccggggcgagggacacgatcttcatgaacttgtgctcgcgcagttcacgaccgaccggtccgaagatacgagtgcccttcggttcacggccggagccgagaatgacggcggcgttctcgtcgaacttgatgtaggaaccatccgcacggcgggattccttgacggtacggacgacaacggccttaaccacgtcgcccttcttgaccgacccgccaggaatggcgtccttgacggaggcgacgatcacgtcgccgatgccggcatagcgtcgcttcgatccgccgagcacgcggatggcgaggagttccttcgcacccgtgttgtcggcgacatgaagccgcgtttcctgctgaatcattgattctccttagccgagctggttctccccatttaccggggcatcgtggttgcccataatgccccggtaaatggcgagccttgccgaactttacttacttggcgcgctcgataatggattcgagacgccagcgcttggtcttgctcagaggccgagtttccataatactcacgaggtcgccaatgtgggcgtcgttgtgttcatcatgggccttgaccttgctggtggaacgaacgaccttgccgtacagcgggtgggtcgaacgctgctcgagctcgacggtaatcgtcttgtccatcttgtcggacacgacgtagccgcggcgaaccttacggaagttacgctcttcagccataatcacttctccttggattcggtagcggccggctcctggctgatgccaagctcacgctcgcgaagcacggtgtacatgcgggcgatgtcgctcttgacagccttgagacgggcggtgttctcgagctgaccggtggcgtgctggaagcgcaggttgaacagctcttccttggacttcttcaagaagccttcgatttccgcgttggtcttctcgttgagattcttgatggagtaatcagcggtaccgactgccatcagatatcaccaccttcacgtgcgataatgcggcacttcatcgggagcttgtcgatagcgcggcggagggcttccttagcgatgtcctcggacacaccaccgatttcgaacatcacgcgaccagggcgcacgttcgcaatccagaactccggggcacccttaccggaacccattcgggcaccgagcgggtgcttggtcagcggacgatccgggaagatcgtgatccacacgcggccaccacgcttgatgtagcgggtcatggcgatacgcgcggcttcgatctgacggttggtcacgtaggccggggcgagggactggatggcgaaatcaccgaagttgatctcgttgccgcccttggacatgccagaacgcacagggcggtgctgcttgcggtacttagtcctcttggggataagcattcttgctcactccttcgtttctgcagccggagcggcctcggcgggagcctcagccttgggggcttcggcggcctgcggggcggcggaacggttgccacggcgcgggcggcgatcgccaccacgacggcccggacggttgttctgctgagcctgctgctcttcgaactcggattcggtcatgtcgcccttgtagatccagaccttgacgccgatacggccgtacgtggtcttggcctcgaagaagccgtaatcgatgagggcgcggagggtctgcagcggaacgcggccctcacggtagaactcggaacggctcatttccgcaccgccgaggcggccggagagcttgatgcggatacccttggcaccggcgcgcatggcgtcctgctgggccttacgcatggcacgacggaaggtgacgcggttggtcagctgctcagcgatgccctgagcgacgagctgggcgtccagcgcggcgttcttgacttcgaagatgttgagctggacctgcttgccggtcagcttctcgagcttggcgcggacgcgctcagcctcggcgccacgacgaccgatcacgatgcccggacgggcggtgtgaatgtcgacgcgaacgcggtcgcgggtgcgctcgatgacgatgcgggacacgccagcgcgctcgaggtccttgctcatctccttgcggatctgatcatcctcaagcacgaagtcgcggtagcgttcgccggccttgttggagtcggagaaccacttggagcggtggttctcagtgatgcccagacggtagccaaacggattgatcttctgacccatctttagcgggctccttccttgttagccacgacgaccgtgatgtgggaggtgcgcttgttgatgcgagcagcgcggccctgggcacgagcgcggaagcgcttgagggtcacaccttcgtcaacgtaggtctccttgatgtacaggtcgttctcgcggaacggctcgccggccttgtcggccttcacacgagcgttggcgatggcgctctccagggtcttgcggaccggcagggccgcagcctgaggggcgaacttcaaaatggtgacggcttcggtcgccttcttgccgcggatgaggtcgaccatgcggcgagccttgcgcggcgtcacgcggacgtgacgagcgattgctttagcttccatgttctattccttatccttagcgacgggccttcttgtcgtccttcacgtgacccttgaaggtcttcgtgggggcgaactcacccagcttgtgaccaaccatggcctcggtgacgaacaccgggacatgcttgcgaccatcatgaacggcgaaggtgtgtccgatgaaatcaggggtgatcatcgaacgacgggaccacgtcttgatgacgttcttggtgcccttctcgttctgctcgtcgactttcttctgcaagtgggcgtcgacgaaggggcccttcttgatgctacgagtcatcttctcgatactcccttacttgcggttcttgccggacggacggcgacgaacaatcatcttgttcgaagccttcttcggacgacgagtacgaacctcgcccttgccccacggggagaccggcggcttaccaccgcgggtacgaccgccgtgcgggtggtcgaccgggttcatggactcaccacgggtgatcggacggcggccgatccagcgggcgcggccagccttgccgagctgaatgttggcgtggtcctcgttgccgacctcgccgacggtagcgcggcagcgcgcgtcgacgttgcggatttcgccggacggcatacgcagctgagcgtaggcgccatccttggcgacgagctgaacggcagcaccagcggaacgagcgatcttagcgccgcccagcgggcggagctcgatggcatggaccacggtaccggtcgggatgttcttcagcggcaggttgttgcccggcttgatatcagcctgagcaccggtctcgatgacgtcgccctgcttgatgcccttcggcgcgatgatgtagcgcttctcgccatctgcgaagtgcaggagggcgatacgggcggagcggttcggatcgtactcgatctcggcaaccttggcgggcacgccgtccttgtcccaacgcttgaaatcgatgagacggtactgacgcttgtggccgccgccgcgatgacgggaggtgatacggccgtaagagttacgaccgccggtcttggacttcttgcgaaccagcgacttctcaggcgtagaacgagtcagctcggagaaatccgagacggacgcgttgcggcggcctgcggtcgtcggcttataaacgcggatagccataatgtagttcttcctttaacttttctcggctaaccttcagttaccaaagatgtcgatcgtctggccctcggcgacggtcacgatcgcacgcttctgggaagcgcgctggccgaaaccggtgcgagtgcgctgcttcttgccagcgcggttgagggtgttgacgttcgtcaccttgaccttgaagatctcttcgattgcctgcttgatctgcaccttgttcgcatccggagccaccacgaaggtgtactggccacggtcggaagcggcgtagctcttctcggagacgacgggcttaagaatcacgtcgtgagcgggcttgtgaatagcgaccatctaaatcaggcctccttcggctcggtcttggcagccacgaaagcctcgaaggcttccttggtgaagaccacgtactgcgaggtaatcacgtcgtacgtgttgagctgatcgacgaaaatcgggtgaacggtcgggatgttgcgcacggagagccactcgttgatgttgtcgcgagtgaagacgaccgtggtgaacttgtccgcggtaatcggggccagagcggcgacagcggccttggtggacggctcggtgataccgaactccaccacggcaacgcgaccggcgttggcgcgatcggacagggcgtagcgcagagctgcggccttcatcttcttgggggtgcgctgagagtagtcacgcggctgcgggccgaacacggtgccgccgtggtaccactgcggtgcacggatggagccctgacgagcacgaccggtgcccttctgcttccacggcttcttgccgccgccggaaaccatgccacgagtcttggtggcgtgggtgccctgacgagcagcagcgagctgagcggtgacaacctggtggatcagcgggatgtgagcctggacatcctcggcggaaacgccgaagagagcctcaggagcttcaacggtgccggtggcctggcccttggcgtcggtgacgttcagagtaacgtttgccatggtttatcaggctcccttcacagccgagcggacgagaacgatgccgcccttggggccaggaatggcgcccttgatggcgaggatgccgttctcgacatcagcggagacgacggtcaggttctgggtagtggcggtcacatgacccatgcggccggccatacgcttgcccttgagaatacggctcggagtggcgcatgcgcccacagaaccgggacggcgctcgttcttgtgagaaccgtgagtacggcggtaggacttgaagccccaacgcttgatggtaccggcgaagcccttacccttggtggtgccggtcacgtcgacctcagcaccctcttcgaacaggtcagcggccagttcctggccggcctcgaactgatcgacgtcgtcggtgcgcacctcgacgaggtggcgacgcggggtgacaccggccttggcaaagtggccagccagcggcttggtcaccttggtgggatcgatggcgccgtagccgagctggacagccttgtagccgtcagattcctcggtcttcacagcggtcaccacgttggtggacacgtcgacaagagtgacgggcacgaagaagccgttctcgtcccacacctgggacatgccgagcttcttgcccagcagagccttgcgattagacataatgcttcctcctcccttacagcttgatttcgatgttgacgtccgcaggcagatcgatgtgcatcagggagtccacggccttgggggtcgggtccacgatgtcgatgaggcgcttgtgagtgcgcatctcgaagtgctcgcgagaatccttgtacttgtgaggagaacggataacacagaagacgttcttctcggtcggcagcggaacggggccaacaacagttgcgcccgcgttcgtcaccgtttcgacgatcttcttcgccgattggtcgatgacctcgtggtcataggacttaagcctgatgcggattttctgtcccgccattgccgtccgccctttctagcgatgttcgttgtactgtttaccaacctgcttctagggcaccggcgcgcatggcctcccttggacatacgtcctctggcggtcatccgacatcagtgcgcggtttccggctgtcacttcacttgaagtggctcccggcccgcgctcgcttttttaattccaatttgcgagcccaaatcaggcaacttgtttattcaagcattgaggtgggacagtggagttcgcgcgtgtcgcgctcatgccgttcgtattacctcgcggcatagccgctcggcgtctgttcgattgtcgcaatgcaggtctcacatctttcttattgagaaccattcgctgcgatatcatgacagatatgacttcccgccgcaagactcttaaacgcgattggttcgacaaccaacctggcgcatgggtaatggttatgctgcccgctgtggctggcttctttatcggcgggcctaatcttgatacgctttggctattggcgacgtgggccgtgtgctattgcgtgcagttcagcgccgcgcactggttcaaagcacacttttcacgccgttatctgccgccgatgctcacttatgccgtagcgctcatcgtcatcggcttgccattcctgattacgcataccggcatactgcgttgggctcccttatatatagtgctggttgcgctgtcgatgctgtcctcgtggctgaggaaggagcgctcgctgtggggcaatgccgtgtcggtgattgccgcgtcggccatggccacggtgatcgcgtcgtttggcagcactgttgagacggcatgtgttatgcccatcaacgcagcacatgcctcgtgcgcagccgctgatgtcaccgccgcacgcgccgcgattcggaatatgccagatttgagccagatattcgaccttcacgcctggtggcccgcgggttcattgcccgtgagcgggctgattgccaccgtgctgtttgcgctgacgcagtatgggtcggttttggtggtcaaaaccatgatccgggaacgcgggaagcgttcgtacgtggcggcttcgtgggtatggcatgtggcgctattgctgctagccgccgtgccggctggacgcagcccgtatctgattgcgatgactgtgctgctgttggcccgcgccgttgcgttgccggtggttacacggcgcacaaccttgaagcccgtggtgaccggcattaccgaggcgtttgccagctttattgcttttggctgcattattgcggcgatttagcgacgcttcagcgattccatggggtggtaacccactcatggggcggtaattgacccatggggcggacggtaaaattttaccttccgcagaatagagccgtttttgtacaccgccccatggggttttcaccgccccatgggcaagttaccgccccatgagtgggttaccgccccatggaggtacctgctggctgagggagcgccacatatgcaaaggagcccggcccctgtaatggggtcgggctccttgtgtcgcgctatgcagccactaagctgcaacaccgcggttggtggctactgatggtgccaccaaccacaaaccgcctgcaatcaacgctcggaggcttcctcagtggcggcctcaccctcgcgctcgatgcgcagcttgtggccttccgcctgggagacaccgtagtaagcaccgacggcgatgtccttcatgtcgttgatcagcgggatgcgcgggttggccggggtgcactggtcctcgtaggcgcgcatgccgatctgatcgagcacggaccagaagtagtcctcgtccacaccgcaatcctggaagctcttgttcatgccgagcttgttgtcacggtagtcctcgacggccttcgccaggttctccacggcttcggccggggtcttgccggtgtcgatgccgaggttgcgggcgatgtcctggtagcgttccggggcgatgtacttgttgtacttcggccaagaggtgggctcctcaggaatctggccgttgtagcgaatcacgtacggcagcaggatggagttggtacggccgtgggcgatgtggcacagggcaccgatggtgtgggccatgccgtggcacatgccgaggaacgcggagccgaatgccatgccggccatggtggcggcgttgtgcatcttctcctgagcgttggtcttggccaggccgggctcgccgttgacggactcagccaggttgtcccagatgagcttggccgcgtgcagggccatgccgtcggtgaagtcgttcgcgtacacggacacgtaggcttccatcgagtgggtcagggcgtcgaagccggcgtcggaggccagcttgcgcggctgggtgcgagccagcaccgggtccacgatggccacggacggggtcagcgcgtagtcggtgatcgggtacttgtagccggtcttgtgatcggtgatcacggcgaacggggtgacctcggaaccggtgccggaggaggtcgggatgcacaccagcttggccttcttgcccagcggcgggatcttgaaggcgcgcttacggatatcgaagaacttctcgcgcacgtcggagaagctgatttccgggtgctcgtagagcagccacataatcttggaggcatccatcggggagccgccgccaaccgcgatgatcgtgtccggctcgaactcctcgcgcatcatctcagcgcccttttcgacggtctcgacggagggctccggctcgacgtagtcgatgatgcggaaggtcacacggttggagcgggcgcgcagctggtcgatgatcttgtcgacaatgccgagctgctccatgaccttatcgcacacgatgacggccttctcgatgccgtacatgtcgcgcaggtacttgatggcgttcggctcgaagtaggtcttggccgggatcttgaaccactgcatgttgttgttcctccgagcaatgcgcttgatgttaacgagattcacggcctgcacgttgccggacaccgagttgccgccgtaggagccgcagcccagggtcagcgacggggcgatggcattgtagatgtcgccgatgccgccgagggaggaaggctggttccagatgatgcggcaggcgtgcatacggacgccgtactcacgcacgagctcctggttgttggtgtggatggcggcggtgtggccggcacccagcttgagcatcttctcgcacatctcgaaggcctgctccttgttgtcggccttgagcacggcctgcaccggagcgagcttctcgtgggtcagcggctcgtcgtcggagacttccttgcactcggcggccagaatggtggcgtcggccggaatctcgaagccagcagccttggcgatgaactgaggggacttgcccggcaccgcggagttcagcacgggcttgacgccggaaccggcagtgcagccgaacatgtactgttccagcttggccttctcttcggcgttgacgaagtaggccttacggaccttgagctccttgatgagctggtcgtagacgtccttgtgggcgatgatggcctgctcggtggcgcagatcatgccgtaatcgaagtgcttggagagcaccagatcgttggcggcgcgcacgatgtcaacatcggtgtcaacgtaggccggggcgttgccggcacccacgccgagggcgggcttgccggaggagtaagcggccttgaccatgcccggaccaccggtggcgaggatcgtggccacgcccggatgcttcatcagggcgcctgtggcctcgatggacggatgctcaatccactggatacagttctcaggagcaccggcttcgatggcggcgtcgcgcacgatcttggcggcttcaacggagcacttctgcgcgccggggtggaagccgaagacaatcgggcaacgggtcttcagggcgatgagggacttgaagatggcggtggaggtcgggttggtgaccggggtgacgccggcgaccacgccgacgggctcggcgacctcatcgatgcccatcacatcgtcttcgcggatgatgcccacggtcttctggccggccagatagttggtgacgtgctcgcaggcgaagatgttcttggtggccttgtcttccacgagaccacggccggtctcgtcgacggccatcttggcgagaacgaggtgcttgttcagagcggcgatggatgccttggcgacgatacgatcaacttgcttctggtcgaggttctcgaattcgtcgagagccttcttggcgcgggcaaccagcgcgtcaacctcggcctcagctgcggcctgcttctcttctggggtcggcttggtagcttcgaccttcttctttgcttctgccacttggggtcctcctcgatcttcttggggtatatggcaaagttctgggccatcgcctcgtcacctcagttgcaccagcgggataccgcctcagtaaccgaaaatgaccggtgatgcgttgtcacattgcacatgtgacctgagccacaatataccgaacggttcggcacgatgcacacgcacaaaatcgacggcgtttcacgtgcgatattgaacagtttttgttaagagttgtgcgagatatcgaacaaattctcactttattcggcgatttggtactttttgttcactttttaccgaaaatcacatgcctgcaaacaacgcaatccgacaacttttttaaatcaagtttccaaaagtactcattttctccacatttctagaaaattggtttaaaaaagtacccaaatcgcctacaaatatacgatttttgtctcacaatctccgcgtcgaggcacatgaaagccactttcataaagtatacttgcatatatctcatcgcacaaaggggcaaatatgagggcaatgccatcaactgcagtgaaagcgcacaaccgcagtgccatgacccagtatctgtatggccatagccatgtcaccaagcaggaactggaacgcgagctcggcctcagcctgcccaccatcacccaaaatctgcgcgccctagaagatgacggactcatccgcaaaggcgaactgcaggattccaccggcgggcgcaaggcgcaaaattatgagttcaatcccgatcatcgcactgccatcggggcagtgatgcggtccaacgaactgcgcctgtgcgcgattaacctgtacggcaacgtcatcgaaaaacgcaacgatgccctgccttaccgcaacaccaacgtttactaccagcgtatcggcggcatcatcaacaacttcgccgccgacgtcgaaaagaagcacggcaaggtgctcggcgtctcgttcgccatccaaggcatcctctcccctgacgccaccaccatcaccttcggcaccattatgggcaacactgggctcacgctcgaaaccatcagccaatcggtccattacccgtgcatgatgatccacgattccgatgcctcagccatggccgaactctggttcgactccacgctcaccgatgcggtgtgtgtctatctggagcgacgcccaggcggcgcggtgattgtgggaggcaagctgtatcagggcccgaaccagtgcaatggcgccatcgaacatatgacgctggtaccgggcggtcgcgaatgctactgcggccagcgcggctgcatggacacctactgctcgccggagaccttgcccgaggattacgaaagtattcccggcttcttcagcgtgcttgagcagggcgaacggcatcatcgcgagcgcatggatgagtggctggattacgtggcgcaggccatcgtcaacgcgcgatccatcatcgcgggcgacgtgattgtcggcggtgaagcagcccagcatcttgaagacagcgacatcgaggatctgaaggcgcgcgtcatcgcacgcagcccgttcggcaccgaccatttcaatctgcgcaagagctactgcgccgaagaccagaacatcatcggtgccgcattgcgattcgccgagaattatctcgacgatatctgtggtgctgcggtacgcggctgatttccgcctaggcggcagcggtttcgggactcatggagacagtcatagaacaccaatcacggcaaaccggatgtcaccagccatggccaggcatacggccaccgcaagcacgaccattaccgcagtcactaccggccataccgaattatcattcattgctgcctccttggagccgatgcactttatgcgcatctaaccacttcgttgtattttcaagcctaaacggcagcattggccctatctgataccaagaaacccacttatggtactttcttgcacggatccgtgacaccgcccagaccggggcggcaatcaatgttctcggcgatattgagatggagtcataccggtttcttccagaaaccgacgattgaaattcgaggcattcgtatatccgctcaactgttgaatcttggcaatgggcatgtttgtgcaagtcagcaaacgacaagcacgccccactcgaagccgtcgaacaaaatcagcaaaaccgatgccggcaactcgcttgaagaagcgagaaaaggtggatacgctcatcgccgccgcatcagcggcaccttgcaagctgacctcatccagatgtgtggaaatataggtgatggcggcgttgatcccatcctccgcgccaaccgcaatctctggattgtattccggcgttaccacggtctggctttcctgcgctgatgcctgctcgaataccgtcagaatagcaataaggtcggcaacccgtctaactggactatgttctcccatggccactaatagctcgccggcctcacgtgccgaatcaccgaacaatacaagtgcatgctgcgaacggcgcaataccgtctcgaaaccggaagtctcgggaaaagcggcggtcaatagtcgcatagtctgcggacgtatatggcataacacatcacgatgagagagccgttctccaggaatgatatccgacaaccaattatgaggcagattggatccgatcatcgccacatgccccggcacgaatggcatgagtccatcccccgccatgagttgtccacttccctcacggataagatgaatttcgatttgtggatgataatgccatttggccagagagctcggatacccgtggcttgaccaacgtatggccgcatccccatcgggcacaatcacttccagcgagcccgcatccgaatgaggaatcgcagtcaagtttcgcgcatccatcgcagacctccttgtcaacgttgcgcagtacagctcgccatatttcgtactttaccgatggaacaactacggcgagatgattgcccgccggaatcctacggatatggcacataagtgcaggcggaaaaagggaaacgccaacatatgccgcaggatttcatcgggcaatcatctcgtcatcaacacgtcacagattagtctcgattgaccgtaatctgcaatttgatatcgcccggacgaccctcatccatacggtcgaaggcagccttggcgtccttcatggcaaacgtgtcagtgatgaacggcttcaggttaagtcggccgctatcgaccaaatcgatggctttctggtacacattggcgtaacggaagatgttctcaatacgcacttcggtggcctgcagctcggtcacgtcaatcggtaccgggttgaccggaataccgacgagcaccgcgcaaccgcccggggcaatcagcttccagaacgtctcataagctttcggcgcgccggaacactcgaatgccacatcagcgccccacccagcggtctcttcgcgtacacgttcaaccaagtcctccgtcgtcaaatccacggggataacgcccggaatctggccgataatacccagcttgatggaagacacatccgaaacaagcaccttggaagcgccaccggcgagcgcagcagaggcagtgagcatacccactgtgcccgagccggtcaccacgcacacatcgccgggcttgatgcgcgccttggtggcagcccacatgcccacggcggtcggctcaagcaacgcaccttcgccaaagctcatggaatcaggcagatggtaggtgaatgaggccgggtgaatgacctcctcacacaggcaaccgtcaatcggcggagtagcgaagaaacgcacagccggatcgacgttgtacatgcccagtcggctggcccgcgaagtcatatccggaatgcctggctcgagggcgactcggtcaccgggcttgaaatcagtgacgccggggccgacctccaacacggtgcccgctgcctcatggccgagaatcattggctgctcaacaacatacttgccaacacgaccgtgcgtgtagtaatgcaaatcagaaccgcatacgcccacggtgtggggtgcgatacgcagctcaccggggccgggatccttgacgtccggaacctcacgcacattgatgacgccctgctcttcgagaacaactgctttcatggtatttctccttatattggttgaatttatttttttgagggtcttgtattgttggtttttgacgagaacagtcagcgagcaccgctcagttcgccgccactttgcgggtgatgcccggctgctcggggcgaatccagaatgagatgaccgagccagagatgtagcaaatggcatatgcccagcacactccggcaaaacctacggtattgagcagtaccgtggcgatgaacggaccacagaatgtggtcaggcctgaagcgaggttatgtgcggaaaccgcagcgcccttgtgctcaggttccagagcagggaatactgcgcccatcggtacgaaagcggaaatacccatgccgagcaccacggcgcacacatacataaatggcaggttgtgcccaaacagctgcggcacatagtacatggcgagagtaccgagcgcggagagccagcagccccaccagcgcatctggctcatccagccgaagcaatcgcccatacggccccagaacacattgccgaatacggtgacgacgaacagcagaccccagatggtggaccattcggtgacctggtaccaagctccgccgccgtttgtatgcgtggcgagatacagcggcataatgaccggaaaaccgtacaaagtgagattgcaaatcacacgcaatacggcagcaagcgcaatctggtggttgtctttgagaatggtcacgccgcgagagagttcacgaagcttatccgaagagctcatcgtgtcaagattggcgttacgggttttcggcacaaaacacagacagataatcatgccgacaatcgagaacggcagtgacacccacagcgaatagtattcaccaatcaccggcgtgatgaacgccggcagataggcgccaaacacaccgatgccaaaggaataggaagtccagaaccagcccatggccgatgccagtttgccgggatccacagtttgcgcaagcaacactacgaagctgtagataaatagcggatagcccatgcctcgcaacatatacgacgccagcatcagcggataactgtggctaggcaatgccacaccgatgaataccagatgcagcacgatccaagaacccgcgccaataagcatgatgcgcttggctccgaacagttcggccagcacgcccgaggaccagccggcgagcgccgcgaccaatccgtacatcgtaaacagcagtgatgcctgcgacgagctgaatccctgatcgacgacatacttggacaaaaaggtcagttcaaacccatcgcctgtcatgaacactgcgatcgccaagaatcccggcagtagttttcgcgccagtccttgtgccatgaccgtctccttttactacgcaaacttcgttgttttcatccgcccaactttggagcgttaatacaagtttcgctgcgaaaatagcagtgttttggcgcgaaaacagtcaagaattgatactttcttgcatggatgttgttatgcccagcgtgccgctcattgttgtaacccagcacaatcatcaggcactaaaaaaacgaccggcgcatgtgcaccggtcgttgaatgttagttatcaggccagcccgtaatataggctgagtattatattgcggccactatcgacacgcatattgcgcgcgaatcgggcgcatcggagccactactcctccacaatctggcagaattcgatggtctcgccgttggggccgtagatgttgaagtagcggatgccatgcttccagaaactcgggatggactggatctcggtgtccttgaagtccacgccgagcgccttggcgttctcgaaggcggcttcgatgtccggggtatcgaaagcccagtggttgatggcgccggtggtcatcggggcggggtcgccttcccaggtttcaatggtcaggtggccgtagcgcaggaaggcgcaacggttctcgccattcatgaacagtccggcgagctcaaagcccataacctcgcggtagaacttgatggtctcatccaggtctttggcaatcatgccggaatgctggaggtcggtagtgaacgcggtcattggcttagccatgtgattctcctttgaatgtggtggttggataaaggttaaggatagtcggacaaggtatgcggcgcggcagaaccatgccgcactcctagtcaattctcgatactttcttgctgacgcaacatgatgttgcgatcagttcgcagtggcaaccatttcggcggccacggttacttcgggcagctaaacgtgcacggatgcgctgtcggtaggttccgaggactcggaggactctgcggatgcaacctttgcgcctttgatgcggtggcctttggcgtcgaagccgggctgctgcgggcggatgaacaaggtaagcacgaaggcgagcacgtataggccggcgtatgtccagcacacaccttcatagcccacaattggcagcaaaatggtggcgatgccagggccggcgaacgtggtcagaccggcggcgaggttgtatgcggacagcgccgcgccctgcttgccgcccgcgtacagggtcatgatggtgggcagcgacgagaacgcgcaggtgccgatgccgacgatgaccgaagcgacgatcatcataatggcattcgcgccgaaccactgcggaatgtagtagaacgccaccgagccgaccgcgagcaccgcgcagccgaaccagcgcatcggccatacccagccgaagcggtccatgaaccagccccagaacgtgttgaaaatcagcgtgatcacgaacacgaagccccagatacgcatccattcctcggttttgaagatgttgatgccgccattgtgggtggtgcacaggtacaacggcatgatgaccgggaacccgtagagcagcaggttattgatgatgcggatgatcgcgcagatgagcaccttgcgattggtgaccaggatggtggcaccctcggccagctcggcgagctgttccttgcggctcagtccttgcgatttgacgattttgttctttggtacgaagaagaagcacatgacggtgccgacgatggagaacggcagtgcgaaccagaaggtcttgtattcgccgaacaccggcatgatgaagctcggcaggtaagcgccaaacacgccaatgcccagagagaagcaggtccagaagaagccggtggcggaggccaggcgggcggggctgatgtattgcgccatcaggaccacgaagctgtagatgaacagcgggtagccgatgccgcgcaaggcgtacaggcccagaatcagcgaatacagaccactcgggatggcgaccccgagaaacagcaggtggatgccgatccaccagcaggcaccgaacatcatgatgcggcgggcaccgaacatttcggcgagcacgccggcgcaccagccgccgagggccgcgaacaggccgtacacagtgaccagcagggaggcctgcgaggacgagaagccttggtcgaccatgaatttggagaggaaggtgagctcgaatccgtcgccggtcatgaagatggcaacggcaaggaagccaagcagcagcacacggggaataccgaatttttcaaaaaagcgaatcatgggttgactccatcaacatcgttgtcagtagaggtggtgcagggaaaaatgcggccgccggaagaaaaagggaaagccggcggccaagctatattggcggcgaaaaccgtgagacgaaacctcttccttccactggcgggaggtggtgcgcagcaccggagggtggtaatacacgccgccggatgcctcccctcagtcggctccgccgccagctcccctcagggagaggagccggcaaagtgccgaaactactcgccgaccttgacgacggccttggagacgccctggatcttgccgtcgaggaagtcctggacttcttcgagtcccagttcgtggctgatgagcggtgcgacgttcatcttgccggattcgagcaggctgatggcgtctttgaaggtgagcgggttgatgaaggagccctgaatggtcagctgcttcttatagatatcgtaggtgttcatctcgaagtgcgcctcctgcgggcccacgccgaacatgagcacctgcgcgcccttcttggcggcggccacggcctgcgcctgggtggccggcaaacccacggcctcgatgatcacgtcataggattcggcaggaatggcctcgcgcgtggtgttgtagacgttcgtgacgccgaacagctcctggttgcgcttgagcttctcatcgaagatgccggccaggtccacctgatgcacgccgtaggcctgcacgatctgggcgaagagctggcccatgaagccgtctccgatgaccagcgctttctggtaggggcgcagcttcagcaggtccacgccgtgcacggcgcaggagataggttcgatggcggcggcgtccttcagcgagacgttgtccggcagtttgtagactacggtggccggtgcggtgaactgttcggccagaccgccgtcacgcgtgacgcccacggcggaaagatggtcgcacagttcggggcgctgggtcaggcagtactcgcactgaccgcagtagatgttcggatcgacggccacgcggtcgcccaccttgacaccagtgacctcggaaccgatggcggccacgacgccggagttctcatggccgagcacgatcggcggcacggcggcggccgaaccggggcggccggcgtacaggtcgtgatcggtgccacacacgccggcgtaggcggtgttgatcagtacttcgttgggctggatttcaggagtgggcaggtcctggatttcgaattccttgacgccggtgagcacaagagccttcatgatgggtcctttctacggtgaaagcgcgccactgcgatgagcaaggttgggccgggtgaccgggtggctgggtaaccaggtgaccggccggcaggcctatctgcatggcgattggtcgcgtattggtttcgttcatctcgctgtctttgcgaggtgttgatgaacagcataacttctttatctcagttttgcaaattatttttataaaactactttcattcggcgtgttaccttggaaatcaagggcttccaccaaaagtaacaacacgtctacaatggagttatgagaaatccaccgttgcatcgttacgccactcgcccagggctgtacttcactgacgacggtggtgctgacgtcgttgttcgttccgaaaccgccgatcaggtttggttgtgcgtgctggagcccattgatgagcccagcgctttcttccaagacgccatccgtctgttcgaggacccgaatatctcctttatccagcagattcatgagttcccggtgtgcacgcgcatcatcgaacatttgtatctgcgcgagaccctgtttcgcatgaccgggccgaactacggcctgtggtacgtgcacctgcccaaagcatgggacggcatgcgctatggctaccgcgtggacggcgcatgggacccgaaacacggcgtgcgcttcaatccatacaaattcctgcttgacccgtatggcaagggcatcgacggctccatggagctcacccccgccgccttctcctatgaatgcgatgtcgtggaccgcaaggtaatcggctcggcatacggtgccatgagcaccgtagactcgctcggccatatgccggtgtccgtggccatcgacgatcgcgatacccataagcatgagggcgacccgcagcacccgcatgtgccgtggcgcaaaaccgtcatctatgagatgcacgtcaaaggcttcaccgccaacgcaccgtggctgcccgaatcattgcgcggcacgtacgccggactcgcacaccccaccacgctcgcctatctgcagggtctaggcatcacatccatcgaactgctgccgattatggccaagcaggacgagctcttcctgcaagaacacggccgcaagaactactggggctactccaccctcagctacttcgcccccgaaccctcctacgccactaaagccgcccaggagaagggcgcggccgccgtgcgccaagaagtcatagacatggtgcgcgcactgcacgaggccggcttcgaagtcatcatggacgtggtctacaaccacacatgcgaaggcggcgtcgaaggcccgacggtctgctggcgcggcctcgacgacctggcctactatcgccatcaaaaatccaataccggccgactcgaagacaccaccggctgcggcaatacgctggacttcaccaacacgcatgtggtcacctttgccatcgactcattacgatactgggccaagcgtatcggcatagacggtttccgcttcgaccttggcgtcacgctggcccgcctggaaggcgaattcacccatcatcacccgttcctctacgccctgcgttccgatctgctgctgggcaacctgaagctcattatggagccgtgggatctgggcaacctcggctggcgcaccggccaattctccgtgccgttcgccgaatggaatgaccgcttccgcgatacggcccgcaccttctggcttgaggatgtggacggcggctccgatttcgggcgtatcagtttgcaggagatggccacgcgactctgcggctcggccgatctgttcgccaccgaaccagggcgtggcgctccggcctccatcaatttcgtgtcctgccacgacggtttcacgctgacggacctcaccagataccgctccaagcacaatgaagccaacggcgaaaacaataatgatggctcgtcggtgaaccattccgccaatttcggcgtcgaaggcgtcaccgatgatccagacgtcattgcggcacgcgaacaggcggccatgaacatgatcggcatgctgctgctctcgctgggtacgccgatgatgctcgccggcgacgaattccgcaacacgcaggacggcaacaacaacgcctactgccaagacaacgacatcacgtggctgaagtgggattggatgtattccaccaacaagacgcgcgaaatgcgccgcttggaaaccgtgtctcgactggtggcgctgcgtaaatcactggacctgtatcaccacgaggacttcttcacccgactgacccagctcggcctactcaagccctcaagccgcgtgcagtggttcctgcccgacggcaccacgccgatggagcgtgactggttcgatctgggcgtacgtagcttcaccatgcgattgctgtccaacagtgaggtggacgtgtgcattgtggtcaacggcaccgctgacgaccgcacattccgcctgccgccagacacccactggacgcctaaatggtgctcggccgaaatcaacggccgccgagccgggcatggcactcaggtcgaggaatgcgatttgaacggtgacaccaccgtctggacgcagcatgtaccggacgccagcgagacagtactcaagatggtcaaagaagtggccatgcagcgtacggaatcctcgactgagaatgaagcggataccatcaaattcgcgatgccagtaacagatcacgccgcaaacggcacctcgtccgcgcctcgggatgaggtatcagctgatatgcccgatgcccctgtggatgatacaccggacactcccgtcgacgacaatgtctggaccatgccggcgctgagcatcacgctgatgaagcaggtgtgagtcacactcaagacagcgcgacacaaacacaaaggctctccgcggaattccgcggagagcctttgtatgctcggtacaggacaagcgaaattaacgcttggagaactgcggggcgcgacgtgccttgtgcagaccagccttcttgcgctccacgacgcgagcgtcgcgggtcaggaagccagccttcttcagggcggcgcggttggcatcacgatcgatggcgttcagagcgcgggcaacgccgaggcggatggcgccggcctggccggtggtgccgccgccgtcaacgaggacgatagcgtcgaacttgccttcgagcttgagcagaacgatcggggagttgacctcacgctgcagcagcttggaggggaagtactcctccagagtgcggccgttgatggtccacttgccgtcacccggaaccagacggacacgggcgacagcctccttgcggcgaccggtgccgtagcccggctcaatcgcggaggtgccggtgccagcgccagcgttggtctcggtggtgtagttggtgagctcctcttcggtctcgacaacctgggagtcgttggtgttttcagccatgattcttatctcctctcaggtttcacttggcctgctgcgagacctgggcgatctcgaagacctggggcttctgcggggtgtgcgggtgctcggcgccacggaagatacgcaggcggtcgagctgcaccttggccagacgattcttcggcagcatgcccttgacagcgttcttgatgatgcgctcggggttcttctcgagcagctcggcgtaggagtcacgacgcagaccaccaggacggccggagtgcgagtagagctccttgcccatcttgttgccagtcagagcaatcttgtcggcattgatgatgatcacgtggttgccggaatcggcgtgcggagcgtaggtcggcttgttcttgccgcgcagcaggattgcagcctgggtggcgagacggccgagcaccacgtcggtggcgtcgatgacgtaccagtcatgagtcagatcagctggcttcggagtgaaagttttcactggattaccttttctatattgtgttccgggtctcagctgcttggtgtggcttggtcagggccgcatccaagaggcgtcgaacctcattatccgtgggctccctgaaagtcctcgatggcgagtgggatagcgctttgaaggaccccttagggaaacacaacaatccactagtatatcgccgggcttgacatagggcaactggggacactccattgggtttatggcttctcttcccctatttatggtttctctcccacccacttcggctaaccgactcacctacggtgaggcaattccctgccttctctcagctatcgcttctttcaggcctcgtctacggacagtccactggactgtccgcttaacgactcggctcgtcagagggaggtaaagcgggtcaggaattgaagatttgggcgaagcgttgggcaccgggggtgtcgaagagggtttcgagcggtaccacgttgcccttggcgtcggccagtgggatgcgccagttcgggtattcgttgttggtgcccggctggttctgcgcacgcttctcccccaccgcgtcggtgatcgaggcggcgagcagcttgcacggcgaacccttcagtgcgcggtacagcgcgtcgacgatatccgcctcgtgatcctcacgatgttcggcaaagtcggcatcaagataaccctgctcgaccagcatggccagcatcgcatcctgctcggccttggcggaggcttcgaattcctcggccgggccggtcagcaagcccagacgctcacgaatcttgacgtgctcgtattccaggtaaccggcggccggcggcaaatcgtgcgtattcacggaggccaatgcatacggacgccactgggagggggcgcggaacacgccgtcgcactgctcgaaccattcaacggcgcaaccgagaataccgtggctcgacagggaatcggccacatggtccggcaccacgccgaggtcctcacctacgaccacgccgccggcacgagaggcctcgatggccagaacgcccagcatgatgtctgagtcgtagtacacgtaagcgccatccatagccgaacggttctcgggaatccaccacaggcggaacagaccaaggatgtgatcgatgcgcaccgcaccggcacgggcgaacatgccatgcaccatattgcggtaggcctcgtagccggtggtctccagattgatcgggctcagcggcggctggctccagttctggccttgctggttgaacatgtccggcggtgcgccgaccgtggctcccttggcgaagcgctcgggattccaccacacgtcagcgccggaggggtgcacgccgacggccatatcggacatgatgccgatatgcatgccggcgtccttggctgcctgttgggcggaggacagctgctcggcggcaatccattccagccagcggtagaagtccaaagtgtccgggtactgcttgcgcagattggcgatttccggggagttgcgattgaacttgcgctcccagttgccctcctcgccgttgggcgccccccacttgtcgtagcacaggcaccacgtggcatacgcctccaagtcggaaccacagtccgccttgaattggtagaatacgctttggcgttcggcggtacggccggccttgaagataatccacagggcgtgcatcttgctgcgccacatggcgtcacggtcgatgagctgggaatcaccgttcagcggttcggtgtcggcatgcagtccgtcgacggcattcttgtcgccctcgctgagcgtggcatattcggcgatcgcctcaggacggatgtacgtgaagttgatcaggcgacggcttaccggcagatacggcgacggggtgagcggggacaccggctcggcggcatgcaccggattgatgagcacgaagtcggcaccggtcttctgcttggcgtccaccagcatggtcttcagatcctcgtaatcgcccacgccccaggagttggaggagcgaatcgagtacagctgggccatccagccccacagactgccgcccttcatcgggtcaagcagatcgacgcgatcaggtgcactgatcaaagtggcgtcttgcacacggtcggcgaccttgacgtgcagcgtatggtaaccaatcggcagatcggcgggaatgaccacagccgcattcgaaatgaacgtaccatccaagtcgtaggcctgggatccatctccaggaccaacttcaatggtgccttgatatggctcgccattctccagcgtgatgctcgccgaaggcacgtccagaataccggtgttcaccagcacccggtcctcgctaccggcgatatgcagcacggtgggtgccaccaatcgggcgtaacgctcgttcagaatgcgtcggatggcgatgagttgggcgctctcgctggaggcgtcgatgcccagcgctgccagcacctcgatcaggacgtcatcgtctatctcgtggtagtcatggctcatgcccaaataactcgtgccgacaccgaccaacttggccagtcgaatcaacggacgggccagacgctcttcactctcggtaatctcactcatagccccagtctaacgccgtttgattgcgccacaccgtaagaaaaatgccatgattccgccaaattatgtactttttaccctcacatagtgagatgtgagcgctcacaatggtggatagggggtgattgccggccaaatttgcgcggcaaaacacagcaatagtgtgcttagcggcggctttccacggcgtgccgcacctcggccgaggggtcgttggccaatttggcaagcatcgcttcggacgtattggggttcagtgccacggcacggcggaccatcgaagaaagcaccgccggtgctccctcttcggattcggtgccaagtacgcccaagaattccaatgtctccgcatccgcagtggggtcctgcgcaccctcaagccgcatcttccagctggtgcgcttgtttttcaacgccgtatcccggaccgcaggcaccgggtccttggtcaggcggccgaccagccaattcttgtcatccccgttggcggccacggcttgacgcacggacggttcggggtcttcggagagtttgaccaatacgttcgggaacggcatggtgtcggcgaggaacacgcgatcggccaccggggtgtgcgggttgccggccacagcctccaaaagtgcggtggcgcgggagaacgccgcctgatcggcacggtcaggcaacggccgacgggcgaattcggacagttcggccgggtcggtggaatggcgcagacgctcgtatgtagcggtcagcggttcgaaatccaccggagcggcggactcggctgcggactgcgcgccttggtcctgctgctgggcgtccgtgtcggttgcagtctcggccgcggcctcggttgcggcctcggtgggctgggtctgctggctggtggtgttctcgtcggtcatgatgcccagcttagtcatacaggcgtcacgcgagcggaaccggaatgttgaccatgtcaatcggagccggcaccacagcggcattgaacgcttcccgcacacgctcctcgaatcgcgcgcaatcatcctgcggcaccaccgcggtcaactcgacgttcaccgcatacgattcatcctcctgactgccaccaagctgcgccaggatctgctggaatcgggccaactgcgggtattcgaggcgaacccggtatcgcttggcggtcatgatgcgggcggcgcgggcggctttcatcgccaatgatgcggcggatgagtacgcgcggaccagcccaccggagcccagcagaataccaccgaaatatctggtgacggcaaccacgcaatcggtggtgcccgactgcttgagtacgtcgagaatcggcttgccggcggtaccggacggctcgccgtcatcgctcatgcgttcggacagtcgcccatccgcgcctccgcacacggcggcatacgccacgtgtcgggctttcggatgctgctcacggatcgcagccacgaacgcgagcgcctcgtcgagcgtatcgacatgggcggcgtcgccgataaattcggactttttttcgacgagcgaatcgtgggcaggatcgtcgggcgtgttgagaatcgtctgcatgagcgtgttccggtggtcgactggctgggtgttcgattgagcgcgaggctaggcagggctatcagcgttcggagacgacgacgttatagtcttcgccggcgaagtaggcggtcaggcaggcgatcatctggcgggtgagctccttgaacgcgccgtcggcacgccagccgacatgcggggtcaggacgatgccgggcacatggcagatggcgtcgtcggcggtcagcggctcatggtcgaacacgtcgagtgcggcgggaacatcgcccttttgcagtcgggcaagcagcgcaccggattcgatgacttcggagcgggcggtgttgatgaacagggtgccgggcttcacatgcgcaaggttctcggcggtgacgatgccgcgcgtggcgttgttcagcggcagatggacggagatgacgtcgctggtttcgatgagcttgttgagatcgtcgaccggagtggcaccggagcgttcgaaatgctcgggcggcacatgcgaattccatgcggcgacctccatgccgagggcgcgggcgatgccggccacggtggagccgatgccgcccagtccgatgatgcccatgcgacggccggcgagttgcagtccatcgccgctggcccacgcccagttgccggccttgacgtccttatcgagttggccaacgcggcggatgagctcgaacagaagggcgaaggtgtgctcggccacggcgtgatcgccataatgttcggcgttgcagacgcggatcttcagctcgcgcgccttatcgagattgaggtagctggcgacgccggtaccgcagaacacgatgcacttgacgtgcccctgcccgctgatggtgcgcagcagatcgtccgaaatgtggtagccgcccaccagcagggcgtcggcatccttcagacgctcggctatggtcgcctcgtcggacgtgaattcctcgaacatacgcacgcgggcaacgtcgtggagcgcggggaactgggccttgatgggctcgatcatcgagtcaagcacggacggcatcacgacgaggggcagatcggtgcgttcgctttgggtttcgtaaatctcggtcatgggctccacattaggaggccggcgggaaaagcgtcaccttgcggcttcccctccttgagaccaagccgagcaactattgctttgccgcctgctcctgcgtgatgttccattccttgacgacgttctggtccgcgcccatcgaatagatgacatcccagatgcgttggcgtatctgagcgtcgtaggcttcgtcccaacatgtgcctatgggatggtcgctggatatcgggcaccattggtagttgccttgatgcacgttggcggtgggcacccaatcgatgcggttgacgcgccacgaccccttgacgcccttcttgccggcgaactggatgcgtgcggtcacaccctgattgttgaccaaggtttccggcgtgttcgccgactcggtgacggcgttgcccagaccgtagataatccacgtgccgttatagttctcgatgggctgcgcacaatggcaaccggcaccgtaaataacgtcgaaggcaccagtgtcggcaagctcatgggcttccgaaatctgccaggaatcggcgtaatcaaggtattcctgcaccgagtgcatggcgatggccaccacatcggcaccttgctcgcgggccttgttggccttgtctaccgcgcgctggatgtcgctgtcgtgattcgggtcgccgtcttcgcgcagacgatccacctgccagtcctcgtcggcggtcatgccgttgagggagaccgtgccggtgaccagacccagcttgccgccgccggtcggggaatcgatgaccaacggtttggtggagtcggcttcggttttgtacgagccggtctgggcgatgccattggcctcaagcgtgccccacagacgggcgatgccatccgccccctgatcccaggaatggttggtggcgtgtgtgcaggcgttgtatcccacgttgcgggcggcatccgccacttccggcggaatgttgaagatcgggtacgcggcatatgggccgccgcgctgggcgatcggggtttcgaattcgcacacggcgatgtccgaagcctgaatgtactgcttcatcggcgcgaacagcgggtcgaagttgaaggcggtgccatccgtggcgttggggttcgggccttggaaatggctccacaatccctcatggaacaacaaatcgccgttgaccagcatggcgatgcagtccgtatccgggcaatccggtgaattgccgtgatgttcggtcaccggtttgggcgtgttcttcgctttattcaacgcgacgtccgacactccggcgtgtgcggggccattgccgtccgtgcgatgggttgcgaaccatgcgccgatgcccagcgcaacggcgagcacgatcacgaacacgataatcagcgccgcacggttggttcgtgtcgagttggagcgatgttgcccctgcccagcgatatggctcatctttgcccgcccttcggaactcttcttctctctctagggtaccgcccatctcggtcaagtactgcggggagggaggcgatgagcaagcgattggacaagcaatatataaaccggttaatcttcaatcaccattcacgaacaccacgcaaaagtctcacttagtggacatttttctttcgtcgctcggacttttcccgacgtgccgcactcgttcgtccactaaaatggcggtttggaggcggacggacaatggcgtacctccgactccgcttaccacaagcggagaccgcccgtcctcggttatttcaggagttacttaacccggagtttccggaaaacaaaaaagttccgagctttcacccggaaccttaatcggcggagtcagagggattcgaaccctcgagccgtttacacgactaacaccttagcagggtgcccctatcggccactcaggcatgactccacgttacgcaataatgcgcaacagcaaattactgtaccacgtcctgcggatacggcgtgccgaacgacacattattgaacgtccgcgggtgcggcgtcgccggagaacgtaacgataaccgcgcaaatcaccaacgccacaccgacgatttcaccaacgctgggaatctcgccgaacgccagtcccacggccaccgccatggcgggattgatggattgcattaccgaaaatgcgccggatgtggtgcgtcgcagcgtgatctgctccaccacatagggaatgaacgaggccatcagggaaatcacaaacagcagagccagcagcttcagcgagccgccgggctcaagcgcccacgtggcatcggccttggggtgaaccacatgagccacagccggcacgccaaggaacagggactggaccagccagccgatggtcacggcgatgcacagattatccagcgaattgccgccagccgccacgcgccggccggtgatgatatacatgccccacatcgacccgccgatcaaaatcgcaatcagaccatacaaaaacgtgccattgccggacggattggccaatgatatgccagctaacagcaccacaccgaccgccgcgataccgataccgacccgctcgcgccagcttttgccggtaatcaccgccaccgaaagcggtcccaaaaattcgatagacacggcaatgcccatatccatattgctgatggccacataaaacagggtattcatcagcaccagcgagcagccgagcagtacgaccagcccccagctgcgggcgtcgcggtgaaacagttgcgctcgcttcgccttgttccagggcctgcgccacagcagcaacagcaccgccatgaatcccacgcgataccacaccgagtacagcggatcgagctgggtgaacgcaagtttggcgacggccgtagccaaataaatcaccagtgcctcaccaatcacgataagaaccacgggaacacggttgaggataccgaccactgccttcttcatgaggtttacgctactcggagagccgggacagcgcgcattgacttggaaggcgttacggacagtgacgcaatgtggacgattccgtggaatcgcacccaccatgcgaaacagccgcacagtgcgtaaacccttggaattccggcgatattcggcattatgacaatgagcgccgcgtcatgcgcgccacatagtgagcatgacctcgttcggcattcctacaatggtggcatgagcaccgcaccgagacttgaggccgccaaacgcgattggggccacgacgagaccggatgcaccgtgctgcatatcgacatggatgccttctatgcctcattggaggtggcgcgcaaccccgggctcaaaggcaagccggtaatcatcggcaccgggccgcgcgcggtggtgtccgccgcgagctacgaagcccggaaatacggcatcaattcggcgatgccggccgcgcgcgcccatcagttgtgcccgaacggcatttttctgccagtggatatggcgtattaccgcataatgtcgcaccgaatcatgcatgaggtgtttttgaccgtcaccgaccggttcgagcaggtttcggtggacgagggctatatggatgtgtccgccgcactgctggagtgggggcggccgagcgcgatcggcgcgtggattcgcgctcaggtggccgagcgcttccacgtgacgtgttcagtgggtatcgcctgtaacaaactggtggccaaaatggcctcgaccaatgccaagccggacggcatgctgctgattcccgcggcccgatcggccgaattcgtgcagatgatgccattgcgtggcattccgggcatcgggccgtctttggagaagcggcttaacgcttggggcgtgcattcggtggctgaattggctcagctggatgaggctgcattgactcgtgccactggctccccggctgcggcacgtggattatgggcggcctcgcacgggttggattcccgcgaaattaccacggtgcgcgaggagaaatccattgggtccgaggaaaccctggccgaggatacacgcgatatgcgcgtggtgtgtgggctactgcgttcggcctgcgacgaagtagccagcacgctgcggcgcaaggggctggtggcgcgcacgctgacggtgaagttgcggttcgccgacctgagctatcagacccggtcttttacgatggagcggccgaccgatacggccggcgtgctgtacccggaatgcgtgcggcagctgaaagtcatgctggggctaccggcctcggcggagtctgccactcccctgcccaaaactattcgcttggccggtatgagcacgtcttcgctcagtaaggcggcggctacggccgtgcagccttcactggatgacatgctcgaagaggccgacaatgcccgcggccagacctcacaggcgcgtttgcatgatgccgaggccgcactggacgctgtgcgccgcaaatttggcagcaaggccgcccagtttggggcgtgaacggctcaacgccacttacgatctcattacgccgtgagacgttcgcaggcggagcggatggcctcgtcggtggcggtggcggagaaacgcaggtaggcgggagcgccgtagaattcgccggggctggggatgatgccgatcttggcgagctcggccatatcggcccagcagtcgccggacctggccttgacccatacgtacagcgcgccggagggcatttgtgccgaatagccatatgccttcagtgcgtcaaccagcgcggataggcggcgacggtaacgcccccattgctcgtgcacagcggctgtgtccttcagacctgcggccatggcggcctgcactgggccagggataatctggccgatctgcttgcggtattcggccatttccttgaccagccggtaatcgccggcaattagagccgtacggtagccggccatgttggactgcttggacagcgagtagagcaccagaatgccagctgccgaaccttcacacacatgtggattcagggcacatggcgtggcggagagactgaatgcggtatcggaggcgggctcgttggattcggccaccggtgcggcaggcacagacgcagcagatgcagacgcggcaggcgcagaggacgcggctgtattgcggcgcaccgaacgccagtccattaacgcatagcattcgtcggagagcaccacggcaccgatgcgacgggcagcagccacgatgtcggtcagccagtcagcggagatgacctcgccggagggattacacggcgagttgatccagatggccttgacgttcggaatattcacccaggaatcgacgtcggtcacatcatcgactttgaccacggtggcgccggcaagttgggtaccgatttcgtaagtcgggtaggagacagccggttggacgaccacatcgccttcgccaaggtgcagcaggctggccatcagcgccacggcctccttggaacccacggtgggtacggcggcagcgttgatggatttcagatccaccccgcgcagttcgcggaaccatgtatcgatagcggccttaaggtcggcggtgccggcggtgaccgggtatccatgggcgttgggggcgtctgcgccggcaaccagcgcctgctggacactgctcggcaccgggtccacaggcgagcctacggacaggtcgatcatgccacccggcacggttttggcggtggctttgaagccggcgatacgagaccagtcgtatggcgacgaatatgcgtggaagcccatgagaacccctttcttggacggtatgttcctaagatacgacgaaccctcggccgtgatagaccgagggttcaatccgaactatgcgctgtgtgcagcgcttatccgcaaatcagcttactggttctgcggcggcagcgcggcgacctgttccgggtctttgccgattggaccattggcggaagcgccgcccaaatcgccgacttcagcgaagaagttgacagcggcatccttgtaccaagcccactcgtccggcagatcatcctcatagaagatggcctcggtggggcacaccggttcgcatgcaccgcagtcgacgcactcgttggggttgatgtacagcgagcgggaaccctcgtaaatgcagtcgacggggcactcgtccacgcaagccttgtccttgacatccacgcaaggctgagcgattacatatggcatggaatcctccttaacaaatactgatacaagggtacgcgcctgttgggacgctcctcgctctcagccgttaacggccttatcggtttcggcggacagcgtttcggtcaggtcgcccttgccgaggcgcgcatgccagtagccgtagccgaagtagatggcgaagccgaccacgagccacaccacgaaacgaatccaggtgagcacggacaggttgagcatcaaccagaagttggccacggcgatgaggatcggaatccacgggctgccgggcatcttgaaggcgcgcggcaggtcggggcgcttcttgcgcataatcgggatggagatggccaccagcgtgaaggcggacagggtgccgatgttgaccatgttggagagcacgccgatgtcgaagaaggcggccacaagcgccaccaccgcgccgacgacgatctgcagagcggccggggtgccatgcttgccggtcttggacaggccgcgcggcagcagaccatcgcggctcatggcgaagacgatacgggtcaggccgagcaacagcaccataaccacggtggccaggcccagcacgatgccgaagctgatgatcttggcggcccagtcggcgcccaccagttcgaaggcggtggccagcgaggggctgtcttgcttggcgagatcggcataggagaccatgccggtggtcaccacggccacgagcatgtacatgacaatgatgagcagcatgcccacgccgatgccgagcggcacgttcttgtgcgggttcttggtctcctcagaggcggtggccaccacgtcgaatccgatgaacgcgaagaacacgagcgccgcgcccgagaggatgccaggaacgccgtacacggatggggtcatgccggtggcgaactgccacaacggctgggtcatcacgccggtgacggcggaggagccttccacggtggaggccggctggctcggcggaatgaacggggtgaagttggaggccttgacgtagaagaagccgacgatcaccacaaagaacacgatggcgatcttgagcacggtcatagcaccgtccacgcgggcgccgatcttggtgccgaatacgagcagcgtggtaaagaacgccacgatgataatcggggcgatatcgatgtggaaggagccgaacgtcaggttggtgttggcgttccagcccatcaggcgcatgaaatcgttgaggtatacgccccaatatttggaaatcacggagccggccatcagcatttccaggatcagatcccagccgatgatccaggccatgatctcgccgaccgtggtgtaggtgaaggtgtaggcggagccggccaccggaatcatcgaagcgaattcggcgtagcacatcacggctgcgccgcacacgatgccggcgatcaggaagctgatgatcacggccgggccggcgtggaaggcggcggcctgcgcgcccaccgagaagatgccggcgcccacggctacggccacacccatgattgacagatcccaccaagtcaggttgcgcttgagcttgcggccctcttcaccggtttcggcaatggtctgttcgacggattttgtacggaacagttgcatagtgctcttcttttttctctgttgtttgcgcaccgaatgcgcacaataccgacaatcgagtatagaagagcccgcgtgtcttgtctattaataagactcagagtccgcaatatatgggattaataacccactccatcaatcaatagcgcgattacagcacaccgacgcagaccggttcgggcaccaagtccactccgaacgcgctcttgactgcctgctgaaccgcacgcgccaaagctgcgatatcggccgcgctcgctcccccacgattggtcaaggccagcgtgtgctgcgtggatagactggccggcgcgtccgcatcgaccttatatcccttatggcagccggcatggtcgatgagccaggcggcggacgtcttggtgccgggagtgccgtcaggcagagtcgcgtcgaacttcggcgcatcttcgggcagggccgccgcttggtcggcggtcagaatcggattcataaagaacgagccgcagctgtggcgattgtagtcgggagcaggcagaccgtcatcgccaacgggaatgccggcggcctcattgagggaggccagacgctccagatcggtcaggatattggcctcgcgcttggcggtggccatgtcaggcaaggcgtagcgagtagggtcctcgagcatgcccttggcggcacgtactgcgagcacggctttgcggatgtcggcggtggccatacggtcgcccacttcgacgccaagcgctttggcaagctgtccgtaacctaccgtgccttcggccgagtgggtcagggcaaaggtgacggaaagcaccacgtaacgtggcgtcgggaagaatcggccggccggccggccggggccggcgtacatgctggtcttcagtgcggagtatcgatagccgaatcgaagatcggcgggtgtgaggtcgcgcgttgttttggtgtctcgatcccagacttccaccgattcgaccgaagtggcgacttcctgcccgtaggcaccgatgttctgtaccacggaagcgccgactgtgccgggaatgccggacagtccctcgacgccctcgagcccgagctctacggtgaaggccacgaaatcatcccaattggcaccggcctcggcattgacatgcacggtgcgatcctcgccctctaccggtgcagcctcgtccggcacagtgatgaggcgtcgggcgtctcgaaccaccacgccgtcaaaaggcttatcggaaacaagcaggttggagccgccaccgacgacgaccaagggcaggcctttggaatcggcatcctccacggcttcgatgagccccacgcgcgtggtcggctcgatgaaatgggcgatggggccgcccacgcccatggtggtgatgtctgcaaagcttgtcatggcttcctatcttagtggcgcaggtgcgatatcggggcaatcatcggctgaaacggcagaacgcccgcgtctgaacgaaggtggcgcgggacttctgccgttttggcggcccgaaacgacagaacgcccgcgaggggttcgttcagacgcgggatttctgccgtttctcacgcgatgcggatactgattccgcaccctgccactcgcctccggagtcaatacgcaaaaacccggccgaatgggccgggttttgtaaagctgtgatgcttgcgatcaacgagtctcgcggtgcacggtctgcttgccgcagcgcgggcagaacttcttgagctcaagacggtcgggcgtgttacgacggttcttagtcgtaatgtagttacgctccttgcactcggtgcaggccagcgtgatgcccggacggatgtcggcgctcttagccattgtcattcacctctgtgttcttaggtatagtgcgcgcccaccggttagcgggcgcgatttgtagcgaggaagaggctcgaactcttgaccttacgattatgagtcgtacgctctagccagctgagctaccccgccagagagccccgagtgagaattggactcacgacctcttccttaccaaggaagtgctctaccactgagctatcggggcgtggcggatagtggattcgaaccactgaagcacgaagcggctgatttacagtcagctccctttgaccgcttgggaaatccgccagtctgtttcccgccgcggtgtttgacctcaacaggcaacttggctatataaccacatattttccaagtacgcaaatcgacccctacgcgaaccttgttttaccgcggaattctgcggttttatcggcgtgtctcacagcgtggtttcagggtccgcttcggccctgcaaacagccccgaccaaggctgcaccccgcacttctaccaatcattttttcttatatggtgttccagaaccttgcaatggcgcggttttcgagcgatgtcgcctgcttgcgcggcacagcgcatgccggcatgctgggcgcatggcttctgatcttgtacatcacggacaatcattcgacgaccagccgctcggattcggcacgctggccattcacctcggtaacggggtcgacgccgaaaccggcgcgatccgtcgccccatcacgctggcgaacacctacgcgctgccctacgacgcctcggccttggcgattgccaagcatctcgaatcgctggatgtggtgcgtttcgtggcgtaccccggtctggaatcgcacctgcaccacgaggtggcggccagccagctggcccgcccggactccgggttcggcggcgtgctgtcgttcggcctcgacaccgaccacgacgggcacaaccgattcgtttccaagctcaatgtgattacgtctgccgtctcgctcggccatgaccaatcgctgatcgtgttcctcggcgaggatgacgagcgccagtacctgtacccgcctgagttccaccgcggcttcttccgtctggccgtgggtctggaggatacggacgatttgattcgcgacatcgatcacgcgctggtggaggccggattcgaggtgtgagaccgcaccgcgcgcatgatttcggcctcttccgccctgctgccgccgtcagtgagtcacaagatggctcggtgacgacgatggcagggctttttacgtcggcacggggacaatacctggcggtctgccgacgatgacggcacttatcgtcggcagaccgccaggtattggaccgtcgccgacacaaaacgccgatttgccgtcggcaatggtccaaaaactggccctataacgacgccaacgcggctcagcatcggcacatcgccatttcgtggcccactgccgacgctggcctcatgccacggcactcagcgtcggtagagagacaaccattggcacagcgcgacgacgctacgaacctgcgacacggaaaaaacaacataccgtcgatctactgccgtcttgtgcaaaatgtcttaagccgctcggccaagtcgccgactgagcctcttccatagggaccccaatccgttacacagtgcagatgcggtgcaacgccgaactcaactacgttgcgcgcatgcacctttatgcatagcaggcatggctgggcgtttggcggaagcggttttcggctcccctctctgagggggagcccctttccgcctggcaagagaaaaccccgactgtccgtgggaacagtcggggttgttgaagttcgctaggcgactaatcagccgaggatggcgagaatgtcgcgggcgccgacgatgaggtagtcctcaccctcgtagtggacttcggtgccgccgtacttggagtacagcaccttgtcaccgaccttgacatccatcgggatgcgctcgcccttgtcgtcacgacggcccgggccaacggccaggacttcaccctgctgaggcttctccttggcattgtccggaatgtacagaccggaagcggtctgggtctgggcctcggcctgcttgacgatgatcttgtcttccaacggtgtgagcttaatcgacactgtgggtcacctcgtatctacttgtagttcgataatgccgcgccagaacgcctcaagaggctgacgatcacttgcgttgtccctttgcgctaggacacatcgtagcgcgattattagcactctgccaactcgagtgctaacgctgtgagagaaaatcgtcgaatcgcaacgctcagttgccgcggcgggcaagaatggagtccaggcctgcgcccaacgaatcggtggtcgccgctggcgcttcgacgtcggcacgctcctcggattcgtggaatgcggctcgctgggcggcgtttgcagcctcgtcatcggcgtccgtatcggcatcatcgcgctgctccggctcagtgtctacagcgtttccggcgctgacagccttgcctgctcgacggccttggcatcgtccgcggccttgacggctcgagcctcgtcaatcaacttttccgccactgcgggttcgacaggttccgccttggacacctgacgggtcgacttgatctccaagctttccggagcgttgtcggcgttatgttccccacccaaagtgaaggagatgagatcctgcgaggtggacatatcgaagacgtccagtgctcgggcagggcgtacgctgaccagttccgacgtggcatcggccggcagcggcatcgtcgcgctcatcgcgctcgtcacgcaccgtaagcgatggttcaactcgaggggcgacggacttgtccgactcagtcgacttgtctgtgcgagcggaggcatcaggtgtggcggaagattcgctggtttcggcagcggacttacggtcggcggattcatcgaccatagcagacggctcggcggcaggcttatcggcggcggactgtgcagtatcagacttctcggactgtttggcgtgctcttccgcggcctgatatgcggcggcggactgacgcaacgccttggccttggcctgctcaatctcggcatcgcgtaacgcgcggcgaatctgccgctgttccatgacctcggtggcagcatcctcaatctgctcggcaggcttctcggcaggcgcagttacggccgcaaccggttcggccttgttcacacgcttgctgtccttggactcggcagacggtttcttggaccagcccgtaccgctatgagcccgctcgtagcggaccaccttgcgctcccattgccgggcctggcgtgaggcattggctcccagcaccagcaccagcagcaacagcacgaacggaataagagcaagcagcggactgaaatgcagggggaacgatacggcaaacaccaacacggttatggcaagcaggcatacggcgagaatctgccggcggcggatggccgcgcggcgcagttcccgcacatgggcgatgtgctcagatgtcagcctcgctgacggtgttgatgctggcattgctgcccctttcgccttatgcggcttgatgtctccgaatcgtctgccgttctctgcatcaacgatatgcagggaaggcgaataacgatcctgccggtgctcgtccacacgtttcatgccgttggccgtacgtacgggcagccatacaacgataataatcgccacaatcaccagcacgacgacagtgctcagtgactcataacccatagagtcaaggataggagacgtgccgacgaactggggctttccgtccgggcgtgtcggagcggaattcttccggtcgacgcttatctggaaccggcggcggcgagtctggcagagaacccttgccccatatcttcagccaacagcgcaaacgttacgtggtcacgccactggccattgacatacatataccgctcgcgcagtccctcatgatgggctccgaccttacgcaccacagccaaagaacgcgcattatccggcagaatggcgatttccagccgatgcaacgcgggcccgaatgggtctccgagcgcccaatcggcaagcatggccagtgccattggcgcgaatccgcggccggcgcaccgttgatcgacccaataaccaaccacgccggtacgcatggcaccatacacgatggctcccaacgaaatctggccgacgatacgcatctggtattcgatggcgaagatcacgccgacgccatgctgctcgttacggcgctgccgctgcacccattgattgaatgtgatggagccgccatgcatcgggtcaccggattcccaaggtgccagccagtcgttgttgcgccagcgcacttcgttccagccgtcctcatcatccatggtcagggggcgcaggactatcggaaaaccgggatgggtgagacgtggcgggcggatctggtggtccagcttgaacgcctctttaatcgactggaaaactgacacggcctttattgtagccatatgaagggcttgcgccttcgcctcggccactttcgttttacggtggaaacactagattgtgcggtatgagcgaagcggacaatggcatgaatatcggcagcgaccacagcggcacggagaaaacagaaaagatggataaagcgacgctgcgccaccatatactgtctcggcgcaagcgcattccagcggaagaacgtggagcggccggtgaattgctggtgcgacggttcccggcacacatgattcaggatggttccacagtggcggcatatgtgtcgatgggttcggaaatcgaaacccggccactgttgcgatggctgttggctcatggctgccacgtgttggtgccacggttggggtctgggttggaaattggctggagtgtgctggattcattggaatccttgcgctcgatggatgcagtgggtggcgcgaacaatgccggtagctgcagctatcccagcaccgtccatcacagacccgatgagccaactggcgcagttctaccgcccgaagcgttggagaaggccgatctggtcatcgccccggctttggcagtggacccgcaaggcaatcgtctggggcgtggagccggctggtatgaccgggccttggctcgacgcaagcccgcgtgccccctgattgcggtgtgctggccgtgggaggtgttggacaccgatttgccggccgaaccacatgatgtgccggccgacggagtgctgacgccggggggataccggcggcttggcgaatcgggccggctgagttgaccggccggccaagatactcggcgcaagccagactgaccaaccagccacgcacactggccgatggaaccagagtggcaaaagcaggctggctagtaagaccgtaacgccaatgtgtcagggcggcgactaggatatgaacggttgcacggcatggtgtttgggccatgcgcgagaaatatgactttgttggaggaatccgttgcctacctatcattaccgttgcaagaactgcggctatgacttcaccgaacagcagtcgttcaatgacgacccgattaccgtgtgccccaagtgctcgcaggagcaggtgcgcaaggtgtattccgccgtgccgattgagttcaagggtcacggcttctaccgcaccgacaaatccggcaagtaaggtctgtacacccgcttttcctctgtaaacgacggtgtcgacggcggtatgccgcggatattggcactacgggcactgtctgttgcacgggtttgaagcgttgtggataacttggcaagctagaaccacataggtcgatttggcttgcgcttacgaaaaacttcaggtcaccatggttgcatggtgaccttttcgtttattaagccgcctgcgcgcggctcattgcggcgacggcgcatggcggatgccttgcgccgactcactgctgcgttgtgcgtgggactcgcagtgctgtttgggcttgaagccgtattggccgtggtggagaccgagccgatggtggtggccgcccgctcgattcgacggggtgacattattctggccgccgacgttcagttggctgatatgccggtatctgcggcaggcccgtcttggacaggcaatattgaggatgtggtgggcaaggtagcgcaaatcgatatcgaagcagccgatcccatttccacgcatatggccagagatgcgcccgtagcaccgaccggcactacggtgattgaagtccgcttggccagtagcgtcgacgatgtattggccggcgatcaggtgagactggtttccgccgtcggttgcgaaggtgctgattgcacgctggccgagaacgccacggtgatgaatgtcggcaaaccggatgcgactggcgcattgggaggcaacgaccgactggtgtcgttcgcaatgccgccggaggccgcggccaaggttatggagctgcaacaggccggagcgattatggccgttgtgcggtaggaagcggaatcggccttcggccaacactgtgttttccgcagcctgtcggctgcggaaaacacagtgttggggcgcacagagtgcgccccaactcctactcgcgctcgttaaaaacggcccaatgcggcggcagttcgccgaggatgcgtttgtcgtcgtcggattgccgttgttggtcggtctgcatgtctccgggctcgagtttgacaccgtcagcgtcaaactgctcagtgcccttcatcaccacgcgcttgtgcttgcgcggtgtgcgccgtgtagccgagtattccgccatggttattcaacctcgcgatagatctcaccgatacggctgacgatacggtcgacttccttatcggggttcacgaaggcggcgacactccagacggtcatcacattccagcccaaggaaatgagatcctgtgccgacaaacgatgacgcctacgcgtggattgcacggacataaagttcgcgtcatcggtctgcacggccaaggcaaacggcttgtccttcaatcccaccacgagcggaatcttcacgcccttgtcgaatccataatcaacagcagcgttcagtcctcgcgcgcgcaacctgtcggcgatatcgtcgaacagcacgttgccgcctgccgcatcacgcaacggaagcaccggacggtcgtcaagctgttcggcccacgtcaacatggtcttcaggaaccgaggaccggattggtgcaatcgttcttcatccaaatcttcggaaccaaaggccgacacaatatccaagctgtggtccgccaatgccagggcatccagcaacagtccgcgaccgcctgtgctttcgagcgggccgaactgctgaagcagacgtccgtgcgtggttttcgcatagcacatcgacagaatcacgtcagtggcacgacctccggccacgtcacgcaaggaaaccaaccgcacatggcgcaggaatcggcccatcgccttggatttgcctgccaacgacttcaattcggcacccaagcgtgtgcggaatgcgtcggtcaacatcacgaccacaagtcgatagctggaaggaaccacggcaaaaccggcggcacgttgcgtaatcagacgcaccacttcatcaatctccggctggctggattccaccagaccagaagacataaccggcacaccgctcgcttccacacggtggaatcgcacctcaccggcagccggctcggtggccacatcatagcgaacaggaccatatccctcggattcaaggaatgcggacaggcgcggcgcacggcgagacggggcagcatccacctcgatatgaggcaacgtgtcgatcagctgcttgacgctttcgctggttaccgtcgcgcagtgggcgatcaccaccacctgctgcacgcggccgatgatggacagcaactcgatagcgggaatgtgcgcgcacgcatcgagaatcgccacatcagccagcacacccggctcggtgagtgcggcgagcgtacccggcgcggccaccagaatcggcttggccgcggccagaatctccggatgatcacggcgaatcctgctcagcgacacactggcgcgccctgccagcacggtgtgcatctggttggcttcctgagtgcgggagaacagcatgtcgcacaggcggcgcatggattcctgcgacaccatcggtccgatggagcgcacgtgctccacatcgacctgcgcaaagcggtcggatgcggcctgcagcgcggcaccatcctggttggagatgatggcggacgaacgcacaatgtcctcaaacacggtggtccaccaggccagctgcacttcgccgcgcacctgctccacgctcactcggcgagcgttgagatcggcgaccagttcgttcagtccggcagaggcgaattcctgctccagcaggcaacgctccggcaaggtgtccagtgccttgcgatcatccagcagtgctttcaggcgtgcttccaccttctcgaaatcggcggtttccagattgccaccagcgggtgtggtggaaagcacggtatccagcgcggtcatattgctgaccagcgcctcttgggtggagatgatctcgtcgagcttgctgggcagcaccggccaaccgccgtgaggcacgaactgatgccactgctccccttgcttggcgactaccttcaacgcttcgtgcaagtcctcgacctgcgcgccgacgcgcagcagatccttggcttccttgatgtggcggcggcgctcccagaatcccatcgacgtgccctcggccttgcgctggctcttcggcttggtggcctcgatcatggagctgatgtctcgctcgaaaatctccggctggaacacgtcaagcactcgtcgcagattcttcaaaaccgtaacctgacgctcccactcgcgggtggtgggaggaaccgggaatccgcaggtctgcacggtgcgtgccacctgctcacgggtggcgggcaggaagcgacgcagcaaatcgtccacgcgctggtaggcggttactgcctgttcttcagtggtgatggacgccttgtaccatgcggtgtcttccgggccgatggtgtattcgccgagctcgccggcgcgttccatcttgccgatccatgtgtcaatatcgttggcgatgctcagggcacttgactcgtcaagtcgaacgtgggtggcagggtgcgtcgggagcacggagatacgggccagattctgaatggtctcgtatgcggacacattccacttatcgttgcccccgtgcaggtcgcccagatagcgggtcaagcgcgagcgcacgcccacgagttcgtcggccagctggtcgaatcgctgggtggcgactccgggctggaatccgactgcggcaatcagctgcttatcaagcgcggcgttggcgtgttcatcggatacatccagtacctgcgccttcatctcattggcggaagccgtctggatgaacagacgcttctgctcggccacgccgggcacgtacagcacggaacgaccattcatcaggcagcgcgatgcgatggccacagcctgctccgcggtgcccttcgggaaggtgccgtcgaccacgatgctatggccattggcagcaagtgacgcggcatatcgcaccgtattgtccacatcgccgacttcgtactcagcatgcgggtctacgtcgaaaggactgtattgcggaatattggcatctttgagcgcggtgcgggcggattcgtcgccggcaagcgcgtccaacagcacattgccggtggggccgttctccagctggtcgatgaactgtcggctttcgctgatcatctgcgacgaggggtccatgaagcatccgagcacaatctggcgctcgatggcgaagtcggagatacgctccgacgcttcggacgaaatacgggcgaacatcgcggaagtttcgggagtgccactgtcatagctggcaccgtcaaacagggaatcctcatccaggaacaccccctgctcacgcaatgtattgacgaacgcgacgttcagggtcacgcgaccggtgaatcgaatggtggtcgacaagccatcatcctcgatcgtgacgctcaccgggtacaacagcaccggcagcgcgttgcccttccatgtggccacgccgaccacgagcgacaactccgccacgccggaaatcctgcgtttggcggcctggtcatccagcacgcgcccaatatggcgttcggcggccttaagcacacccgtgtcgcggaacaacgaatccaaccggacatggccggaagcgaacagctgggcgatgccggagggatgggcatgggtcatctccagcttcgcggccagttgattcacatcctcgagcggcgatggcggctgcatgctgcggtattggtcacgccagcgacggatgcgattcagaccttccgtgagattctggttctgagtctggctctgggtcatctctcgactcactttccaaccgcttcgcggtattcctgatagcccttgttgtgagacagggcttcgtcaatatcggcctcgccacgggcggcgagccaagaatacatgtcgtcgtacaggtacggattcatggcgaggaacgccagcaattcgggatgacgggcgacttcgaattgaacattgaaatcttgcgtggtttttgcctcgtcagaggtcaggccatcgacttcgactgccggctcctgtgctttcagctcgcccttggccacacgctcgaacaccgagccgggctcgaagaccggagtgtgtacgcccgtggagtcgatatcatatgcttcggataccgactgctgggcggtttcggcagccggctgctggtctgctacgcctgctgcggtggcttcttgatatgcttcggctgcggtccgctgctgatcgtccggtacgtcagctgccggctggtcggtttcagactgggcggttgccggctgagcggtctcaggctgggtgttttcagattgagcggcttcggcttcccgggcggcttcaggctgggcaacttcagcatgctgttcgacagtgtccgccggctgagaatcgccggcattcctggtattcggagcggactgaacgttttcggctgacttgcttgcgccagccgctgcatcggattcaacaaccgccgccgacgccactgccggctcgcttgtgctgggagcgtgcttaacaacggcatgggcgatggcatctactggaacaataccggagatcctgctgtgcttggatgcaggcgttacaatcgtcgactcaggttcggtctgctgcttcggcagtgccacggagttcatggcctgctggtttttgcgttcggtctcctgctcggcatgctgggccaacgcatccgcgaacagatcacggggtatggccggctcatcgtttttcgtcactggctgcgtgatattcagcgagccaagttcaagctcgtcgaccttgcgtcgaacattatccgcgctgaagatggcggtcggctcgccggcccgcaaatcaagaatatcgtcgacggacatatccgccgcatccggctcctgcggtgcttcgtgaaccgcatagccaaacaaatcaggcaccttgaggtcgagcggctttgccactggatcgtcgacacgaatgaagtccgcaggcacatcgccgaactgcatgcgcatgggagacgtcggcaacaggaactcggcattggccggcaagcgcaacaaatcgccattttcccgcaccacatacgatccattggtcgatccaagatcacggaccgaggccgtgccattgctttttaccgtgaacatggcgtgccgtttggacatcgatttggtttgatcggcgacgtcaaggcgggtgttgccatcatcggcaagggggcgtaacggcttacggccgatttccacgcactcccccggcttgacgctgatccggtcgacaccgttgatcttcaccgtccactcgctcaccgtgaccgccttcctggacacactatttgaccacactacgtgccattgtgtcatcttttaccggcttttggcggattactgggcacagaattgacaactttcgctcattgccagctttgtgtttccacgccggatcgcgttctccgcctcgtcctcgtcaactagtctactcagtatgcggaaaccccgcagcctgaaacacaggtgcggggttcctcgaaaagctgtgattgcggcttatgccgcacaaatcacttgagctcgacgctggcgccagcctcttccagctgagccttggccttctcggcatcttccttcttggccttctcgaggacggccttcggagcgccgtcgacaagagccttggcctcggccaggccgaggttggtgatggcgcggacagccttgatgacctggatcttcttgtcgccgacggcggagaggatgacgtcgaactcatccttctcttcctcagccggagcagcagcgccagcaacagcggcaacagcggcaaccggagcggcagcctcgacgtcgaacttctcctcgaaggccttcacgaactcggagagctcgaccagggtcatctcgccgaaggcttccagcagctcatcgttggtgtacttagccattatggcttcctttcaatcttggcggcggacgaagtggtagatccgctgcctaataaaccttattgtttaaattatcgaagcgactgattcatgccgtgagggcgtaaatcaggcagccttctcctgcttttcgcgcagggcgtcgatcgtgcgcacagccttggtaggcagagcgttgaacaggtacgcggccttggccatcgatgccttgatgtcgccggcgaattcggcaagcagctgcgggcgggacttgaggtctgccagcttcttggcgccctcggcatcgtagacagtgccgtcagcggcggcacccttgatgacaagagccttgttgtccttggcgaagtcacggatgaccttcgcagcctcgatgaagtcgcccttcacgaaggtgatggcggtcgggccggagagaatctcgtcgagaccctcaatgcccgcttccttggcggcgatgcgtgccagcgtgttctttgccacggtgtaggaagtatcgcggcctagcttttcacgcagatcggaaatctgcggaacggtaagcccgcggtactcggtcaggtagacggcgtcagcgttacggaattcttccgtaagctgagcgactaccgcttccttttcgggcctcttcatggcgttccttcctaagtcggccgttgacttggagttcggaactttcggccgggcaacaaaaaagccctgcgcacaggcagagcaatataatctcgcgaagcgaccttcgccggcccttgacgggcttatatctctcaacctgcgctggcttggcgaaccaaacttcggaaatgcactcgcgcgcacttcaaccaacggtctgtggtttacggatgattagattacggatggtcagcgacattgcagaattcgggcgtgtcgcggggcattacagcgtggcggcgtactgggctacggacgcggtgacttccttcagatagtcgagcgagcgacgccagtggccgggcacctcgatcgaatggttggcatccgggtattcgtgcacgtgcggggtgagcgcgttggcgcgggcttgatcgtagaacgggtcggcggtgccggcgcagatcagcggtgccgggccggagtatcgggagctggcggcgtgcgactggccggcctgttccgcgcggatgatcacccttgcttcggccacgctcggggcctcggattcggcgacgatatcatcgccgacagccggcaccggaatcacccgggcggatggatcgaagtcggcgtgatgcagcaccggggtcagcagcacgaacggcagaccgtagtgtgaggccacatgtgggtaggtcatcgtcgtcagcgacttgccgatcagcaacaggcgagggccggacggggtgtcggaatcacggttcggcgagccagctgcgccatcggccagcacggtagcagaatcatcggcggcaacgccatccccggaatcaccggctttacccgcgccggactcgcgcgcggcggccacccagccgtcaatcgcctgattgaggaccggaatcaccgtggacaggtcgtcggaagcgttgcgtacgttcatgcggtcgattcgccagccggcctcgaccagagcctgggccgaccagtagagcagcggacggtcgcagttgtagccggtgccgggcatcagcagtacgcggccgtactcctgaccgggcttgacgacattcttcttccaagaggtgatgctgacttcgacggccggtttcatcgcgcgccttccttccacgggtgtgtcctgcgtgtcccctgagttgttccgaattattctggcagtcagtctactcccggacccgttcacgttgcctccacaagctataatcggccacggttctgattgggtgcgcagcacctgacgcgcgttgggcaggccgatcagggcgagtcgcaattctcgccggggccagccgcagcattatgcacgcggtgcgcagccccgcataaacccaaggaagtagagagtaaatggagaagttcttccatttgaaggaaaacggcacgaccgtctcgactgagattctggccggcctgaccacgttcttcgcgatggcttacatcatcgtcgtcaacccgcagatcctgtcgcagacgggtatgccgtggggcggcgtgttcctggccaccatcatcgcggccatcatcggcaccctggtcatgggcctgttcgccaacgtgccgtacgcccaggccgccggcatgggcctcaacgcgttcttcacctacaccgtgtgcttcggcctcggcttcagctggcagcagaccatgtgcatggtgttcctgtgcggcctgatcaacatcctcatcaccgtcaccaagatccgcaagatgatcatcctggccatcccggagtccctgcaacacgccatcggcggcggcatcggcctgttcgtggcctacgtgggcatgctgaacgtcggcctgatcaagttcactcccggcgatccgaaggccgccgccaagggcggtgccgttgcggctaccccgggtctggccaactttaacgacaaggtgctgtgggtcttcctgatcggcctcgtactggccattgtgttcaccgtgatgaaggttaagggcggcatgctgctggccatcgccatcaccaccgtaatcggcatcccgttcggcgtgaccacctggtccaactcgcagtccatcagcgagaccttctcccagctgccgcagaccttcggcgcgatcttctccgccgagggcttcccggcactgttctctgatccgaccaagctgccgctggtcatcgtgaccatcttcgccttctccatgtccgatacgttcgacaccctgggcactttcatcggcaccggccgccgcaccggcatcttctccgccgaggatgagaaggctctggagaacggccacggcttctcctccaagatggacaaggccctgttcgccgactccatcgccacctccatcggcgccatctgcggcacctcgaacaccaccacctacgtcgagtcttccgccggcatcgccgcaggcggccgaaccggcctgacctccgtggttgtggcgatctgcttcgccttgtccgcgttcctggccccggtcgtctccgccgtgccgtccgccgcaaccgccggcgtgctggtgatcgtcggctgcatgatggccgcttccctgaaggaagtcaagtgggacgacatcgccgaagccattccggcgttcttcgccgccgtgttcatggccttctcctactccatctcctacggcatcgccggaggcttcatcatgtactgcatcgtgaagacctgcaagggcaaggccaaggaggttcacccgatcatctggactgtggccgcgctgttcattctggacttcgtgtgcatggcgattctgtaacgctgattgacaacggattagcctttaaggattaatccgccgccatacggcataaaggccgggctctcacaagggcccggcctttgttgttgccacagtgatcaacgcccatgagtaccttcgatgatcatccgccattcttgatgcatgggaatagttgtcaaccgacaactaaacgtacatggcggcagcacgagtgccttattcaacatcgaaatatgcagtgcgaagaagccgaaaaaccaaaaaggcttctataccgaatgaaacggtatagaagccttttggtttgcgatcaagcccttctcacccgagagaagctagagaacgatcagtcctcgaatgccgaaccgttaagcgggaagccctacgggcttcccgtaggtgaggggagcggctatgccgcgaccgatccgtgagagggatttagtcctcgaacggatcaaagtcgcgacggacgcggcgacgcgggcgctcagtacgctcttcgcggtcggcgcggtagtcgtcgtagttgtcgtcggtggcgtagcgcgggttacggtccgagccacggccacggccacgggaaccgccacggcggtcatcacgatcgccacggtcatcgcgatcggaagagcgacggcgacgcggacgatcatcgtcacgggagtcgcgagcatcacggtcatcgcgatcgtcgaagtcacggtcggcagaacgacggcgacgcggacgatcatcatcgcgatcatcgcgatcgaagtcacggtcatcggagcgacggcgacgcggacggtcgtcgtaatcatcctcgaagtcatcggagcgacggcgacgcggacggtcgtcacgatcgtcgaagtcacggtcatcgcgctcggagcgacggccacggccgccacggcgatcgtcacggtcaccacggccacggccgccacggcggtcatcgcgatcgccacggctcgggcgggcgttgttctcctgatcctcgaaaccaggaatggccagggagatcttgccgtgatcatcgacaccctgaacgatcacctcaacggtgtcgccttccttgagcacgtcttcgacagcgtcaatacgctcgccgttggccaggttgcggatctgggagatgtgcagcaggccgtcggtgccgggggtgaggttcacgaaagcgccgaacgacgtggtcttgacgaccttgccgttgtaggtttcgccggcctcgggcacgtgcgggttggcaatctggtcgatgatggccttggccttctcagcagcctcgccaccctcggaggagatgaagacggtaccgtcatcctcgatggcaatttcagcgccggtgtcttcctgaatctggttgatcatcttgcccttcgggccgatgacttcgccgatcttctcaaccgggacggaggtggtgatgatgcgcggagcgaactcgctcatctcggccgggccgtcgatgcactcgttgatgacctcgagaatcgtggcgcgggcttccttggcctgctgcagagcggcggccaggatgtcggcggggatgccgtcgagcttggtgtcgagctgcagggcggtgatgaactcggaagtaccggccaccttgaagtccatgtcgccgaaggcatcctcggcacccagaatatcggtgagggtcttgaagatgtgcttgccatcaacgtcgccggacacgaggcccatggcgatgccggcaaccggagccttcagcggcacgccggcagccaaaaggctcagcgtggaggcgcacacggaacccatcgaagtggaaccgttggaaccgatggcctcggagacctgtcggatggcgtaggggaactcttcgcggctcggcagcaccggcacgagagccttctcggcgagggcgccgtggccgatttcgcggcgcttcggggaaccgacgcggccggtctcaccagtggagtacggcggcatctcgtagttgtgcatgtaacgcttggactgcggaccggacagcgcgtcgatctgctgctccatcttgagcatgttcagcgtggtgacgcccagaatctgggtctcgccacgctggaacagggcggaaccgtgcacgcgaggcacaatgtccacctcggcggacagggtgcggatgtcgcgcaggccacggccgtcgatgcggtagtcctcggtcaggatgcggcgacgcacaatctggcgctgcagttccttgaaggcgttaccgagttccttgtccttctcggcatcgtccatatcggtgaactcgtccgcgagcacctcgcgcacgtgctccttgatctcgtggatgcggtcctggcgcggcagcttctcggcgatggagagggcctcgtccagatccttgtgagcgatctcgtcgatgcgggcgtacagctcgtcggtgtactccgggaagagctggaattccttggtctccttggcggcgatcttcttgagctcgtcctgagcctcgcaaatcaccttgatgaacggcttggcggcctcaagaccaccggcaacgacttcctcatcgggcttggtctgaccctcgtcgtagatgaggtgccaggcgttcttgccggcaccggcctcgatcatggcgatggcaacatcaccgttctcgatcacgcggccagcgaccacaatctcgaacacggcgcgctcacgctcgctccaacgcgggaaggcaacccactggccatcaatcagcgccagacgcacaccggagaccgggccttcgaacggcagaccggaaatcatggtggaagcggaagcggcgttcagggcgatgacatcgtaagcgtcatcagggttcacggcgagcacggtctcgacgacctgcacttcgttgcgcagggtgtgcgggaacagcggacgcagcgggcggtcgatgatacggcaggcgaggatggcctcggagctcgggcggccttcacgacggaagaacgagcccgggatcttgccggcagcgtacatcttctcttcaacatcgacggtcagcgggaagaagtcgtagttctccttcgggctggaaccggcggtggtggtggacagaatcatggaatcgtcgtcgaggtaggcggccacagcgccatcggcctgctgggcgaggcggccggtctcgaagcgcagcgtgcgcttaccaaacgatccattgtcgattacggcctcaacggccttgatttcgggaccctccatagggttcctccttctttaattttctatttattcctacatactgtgttgcggtttggcgactcgcttgaaccgcaactgtcctcttcagcggacgtcacataccttgtttcgactggccccttggccgtcgttcctcgtgtcaaccccttcattcgggttctctcgtcggccttacctactggctacctgcgtgcgtaccgttttttccctactggcctatcctctaaccctcttgccgttgttgccgttggctggcgatatgtaaaacgcccgagcaccatcctaggtactcgggcggaagtcttcaattatcgacgcagacccagacgctcgatgagggaacggtaacggttgatgtcaacgcgcttgaggtagtcaagcaggcgacgacggtcaccgatcatcagctgcataccacgacgggagtggtggtcgtgcttgtgctccttgaggtgctcggtcagatcagcgatacgcttgctcagcagagcaacctggacctccggagagccggtgtcaccttcatgggtcgcgtacttagcgatgatttcctgcttttcttcagccgtcagtgccacggcatcctccttatattgctgcgcggtgctaccggcccgatgccggcgcgctctctatccgcgggcgaaatacgccaagggtcaattatacaggagcaccagacaccacgaatcagaccaacgtcagcaggccgccaaacatcacaacaagcaaagcaatcgtctcaatcacaaaaaaaagataaacgacgcccaactgcgcgtcagcacattcaacggcgactcttttttaatcgtcaccaacaatcccacccacagcaccgcgaaaacggcaacgccaataccaactgaaataatgccaagattcgccgcattcgccaatgccgacgactctccgtacaccacatatgtcgcataccaaaaatcaattttcagaatgcgcaggccggcaatgagttgctccgccgccaagccaatcacaaaaaccgcgccccacaagcgccgatgggcgtcaacaaccagcagaccaaggccggaaacggcaatcagcgtcaccgtccaggcaacaaacgcggcgccgcgcggctcaagcgcgctcaaattatcaagcagccactgcgtatcgttcaccgcaatcgcacgcccccaccaatacggcaccacaatggccgcaatcaccagcagcgcataagccagccacaatgcaggatgcgagcgcttacgctcaatatcggccagcgacagcgtcgattcgggaatggacgccaccggatgcttggaaacatcgttatgtttggaaacatcgttgggcatgggcgaaacaccatcggaccgcgtatcgatttcagcctgcacctcaccgctcgcctgctggtcgaccggctgtttctccacgctggaattcaccgccatctacgtttacctcgcgttcgttgttcgacgccacacctgtctgcacaatgcgtcgtctcatgccgcgacgcccatgctaggacggtattgtatcgtgagtgcgccatacgataatgacatggcgccggacataacgccgcaatacctgattttcgctaatcgcaaccatgcttcggcggacgacataagccatacatatgttcataagggcgaaccatatccgaattactcactccgctaacatcaccacataacggcaacatagatacacagccatacttgatatcaggagaacgccgtcgattcgaaatgaaaactgccagccgcccacacaccagctcctttgtttccaaaatcgcacattctacgccgatgtcatgctccaccatgtctcacgccgcggtctcaacataacaggatgggttgtacgaatccacgttgccgagcattcgcacaacccaccattgcgacacatcactgattccgcacattcaatcgctgcaaccaacaggctgcggcgatatttcagcgcgaagagcggcgtatccgaatgacactgatgccagccagcatcagggcaattgcagacagcaccatcggtgttacggacgaaccagttgatgacagttcagatgaattatcatcagcagtagaagactgttgctggccgccatcaccggtctgatcgccgttacccgactggttaccgtcaccggtctgatcaccaccaccaggatttccgccatcaccagactgacggtcaaccgccaattgcgcgagctgcaaactcagtgcacgctgcggggcatccacctcattttgcgtggaaggatcggatgccaacgcctgctttgccttatcaagtagcgtgagcatcttatcccactcatccataggatattccgcagactgcagagagtcagcctgatcaatggccgaacgcagcttagacgtatccacagctttgccgtcagaagtcaacacgtcgctcaagtcatagtaatcaaaatcgacataaccacccgtattctccttggcgtaattgaacaagccgattcgataccccttaaagtgcgacaagctccaatcgtaagtcagcggcccctgctcgtcgccaagcttggaccattgcttaccgtccagactgtaccaatactgaatcgtcaacttaccactcgcattatccagtgtgttgtccgacttgatccacacattggtcgcatcatctggcaatgtcactgtgccgcccgatacaaaggcctcttcagcgtcacgatcaatcgtatcgtcaacgatattaccgtccgcgtccttcacgccattgtcgtagacacgcttgaccacgcccaacgttcgctgtccattttcttgacgcacagcggcataggcaaaactacgggtatatgtagcgaggcctgcggtgtctccatccttcatatgactgacatccatgtgggtttccacagacatggatccgccaaaggtacgctgcgacaaaacgttacgggcggtttcaaaatatgtcaggtcgccataagtgcctttcatatatttggccgtggcggaaaccttgtgcccattggtcaaacgcaaccagccttcacgatcagtgagagaccaatatcggttatctggattatgtccccattcccataccaaatcaagattcgaaccattgggttggtattcttcggcgaccggatattccttctcatcagcaagaccgatcagggaaatatcgtcgatgacgtaatccatgcacgtgccttccgcaccccacgcggtttcgacaatgagtttggaaccttccacattagcgtcggatgggatggagaactcacctgtgatagtagtcgtctccccacgtttcactgttcctgtggccacacgattaattgtgccgtctgcatattgaatcgccacataaaacaggtgggaagtcacagccgatgaatcgacgccgtccatctcatggtcgtatcgaatcgttgcactggcacgatatgtcacgccctgctgcaattttccatccatagattgacccgggccagcgccattgtattcgccacgattcgtcacagcaagactcgtggttccagaaagagaaccatccgtaatcgcggtaagcgtaccattccactgaggggtccacgattcagtcccgttttcgaaatcgccattgtccaccagctcgattccaatcagagaatcgtcaacctgaggaggctcctccagagtccaccaatcctgatcctgataagactgatgaggcgcgtcattatcaaaatcgtccgaattgaccagggaacgctggcgaaccagattctccaaatcagcaggcaaatcaatcagtttgtcgtaggtgtccgacgcgcttacctgattattgtccccaaacacaggccatccgtcatcaccccacgttgcaggaatcaaaccgggaatacgtccggtcggatatgtgtctcggaagaagaatccatgccaagacgtcgtgccatcaccgttgtcgacttcaacaaggctaccttgtgcgaaagcacctagataatactttttggcttcgtatttggagccatcaagcaaatcagtggtgcgcagcagcatcaccgtacgaccgtctttgccccagtaaatcgttggagtatagaaataatcaccgattttgaaagtctgagatccttcaaatccggtaggagtctcaccaagatcatcagtgaactgttcggcagagatgatattctcatggctctccaccaccgtggttaaatcatcggacagcctatattggttgacgccggagataatccaaggactcccttgctcatcaaaatacaatgacggatcatggaatccccgattaagggcaatcttcgtccaaggaccattctcaatatcatcggtgtagtagatataagcgccattaaggttgttcgtattgaataacacgtagaagcggccattgtgatagcgcagcgacggagcccactcgccttcgccatacgagctagctccattgcgcaaggatgaagcatcgctcatagaaatgcgatcatacacgtacgtgactatccaccaattgaccagatcataggatttcataattggagatccgggactgagctccatagtggtactcaccatgtaatacacatcacgaccgtctttgttattcggatcgtccttcgacacacgaataacactgatatccggaacatccgtgttcaacatgggaatggaatacgtgccatcaccgctatcagtcgtggtgtaactgccatccgatggcgttgaagatggcgttgaatcatccgcaaagaccggcattggcgccaaaatcaacccacaagtcgacaacaccgcgatagcactagccgaaattttttgtcgtaaataattcataagtcttttaacctttcatgataagcactcaacatcgagtgcgtattccaatagcatgcccgcacaaatcagcaatgaatgacgataagacattcccgcatatggataagtgatggacattaccactgccaaaacttacgcttgaacaagtaccagttctaggtttcatgtgcggtcatcccgaggctgccgctacgggatgaccgcattaccaagaggtaactagcgcatctcgcgacgcactcgcgctacgatcacaccagtgagagccaagcaagcgacaatcacagcaccaggcaagacagaggaaccggtttgtgccaaatccacgccatcgtcattggagccgtcggcattgccatcagtggaatcatcagccagcttcagaccggcacgtgcactattcaatgcagcaagcgcatcttgaacctgctgttcagtagcggattcatcctgcaataccgcctgagccttctgcaatgcgtcagcaaacaccttccagctctcttccgtgtaatcggaagcgttcaggctggaattctcattcactgcgctctgcaaatcagacttgtccaccggagtcgaaggagtttcatcctgcgactccgtgaaagtgtacgtagtgatgtcgtacagctcatcctgagcattcgcaccaccatcggatttgaaggagaacaccacatgatgcacccctgtcacaccctcaagggtggtcgtgtaatcggcgtactcggatccatcaccggcaggaatcgaaatagaagccacaggttcggaatccggatcatcaagacgaatctcaaggatgcctccggctttgccagctgcagtcacagtcagcgaagaggcgccgttattcccgaaatcgacattcgccaaagacgtccactcaccattattaatattgctgagcttctgaccttcggaattgtctgtagtcatatcgaccacgcgcacaccagaagtcaggtcatatgcgttctgaatgccggaatcccatgcaatggtggaagctggaatgcctccatcttgatacgcgtccagattcttcaccgaagagagaccctcatatgtcattgcaatatcggcaatggaaccatcctcgttaaccgtaatcggatcgagatgagtatttcggtagccatgcgccgcgtcaagattaccgccgttcatcaattcctttgccaccgtttgcgcatggtaggtcatataccactggtcgccaagttgaaccatcgcgtgatgattgttgccgccaacaccgaaatacgtgctcggattcttcagaatctcaccctgataagtgaacggccccatcgggttgtctgaagtcatatacgcgatattgccgtaaccgaccgtgttaccatcaattacgttgtcatggctgaaattagtgcaatacgagtagtaataagtaccacctatcttggcaatcccggagtcctcaaacatggcaggtgcgtctatgacctgagcctcaccttcggtatgcagcatgtcatcggacagtttaataacgcgagccgtgttcggatgttcttcctcgcctgtcggaacaccacctccgtaatacaggtagccctgcccgtcatcatccacgaacaccgcgggatcaaacagccagaccacaccagcggattcaggagtaccgcccttaatcaacagctcaccggtttcgtccttccacggaccaacaggagaatccgaggtcagcacaccgataccgctgccgccattggcgaaatacaggaagaacttctctttaccgttgatggtcttatgagcgacggcaggagcccaggaattgctggcccaggtggccaccccctgttctccagccacacgaatgtaaccctcattacgccaattgaccatgtcatcactggacagaacattgatggtctttacttgagcgaacgaattgtccttgatctgcccagtactgtcatattcatagtcataattcaacgagccatcagcattcacagaagtgccatcacccgtagtgtagatatatacgcgtccgttgtattccatagcccacggatcggcgccataccaataatcgataatcgggtttgaatagtcgccgaaagccttggctgccgttgccgtacccgtagtcggcggcacgaatgaggaaccagaatccgaaccggttacggaaatgtcgtcgacaatgaagtcggcattgctcgtgccatacttgttttcaatcaccagcgagggactggtgaaatcaccactaccacctaacgttccagtacctgaaatttgtgtccactcacccgctttcgccgttccggtcgcaatctggtcacatccggaaccattacccgaacaaacagtgatattgaattcaccgtcttccgtggccttgacccacatacttccggtatatgtctgtcctttttccaccttgccatcaagagactggattgcaccagcatcagaggatgtacgatcagtaacgctcaaggcgccactgccaccatgcacatcatccgcagtgacggcaatggacgatgcggagctattccacaccgttccagacttccaaccattaagatcgtcttcgaatccgccgttgacgaccaattcgacgggttcatcggccgacgccgcagtcactccgatagtcgctggaaatacagcccccatgcaacacagcacggatgcagccgcagcagcaaccacacgaccggttttccttgtttgcaatatgtgaatgttataaaccattcagttccctttcctgaatgatggagggcgactccccccccatcattttttcttcgccgcacaatcgaatcccacgttggttacgaccacatcgcggctcattgcaaagccatgccagaggaacgtccctcaagggcagccatgcaacagccattgtataaatgagcgcatctcactcgcgatcgtccttgataacaaattgataacgatatgcacaatgaaaataagttcacataaacgcaacgcaacacatcaaatatgacagtttcatatgccaattacacactttgcataacatatttcaacaaagaatggagacgtacaagcgaactcatctgatgccaccactcatcgcctataaagctggcgtgtcgcgccacaataacatcacagccgataaaacgacaccccgaagttgagactcattcaacaatgcggccagcttagacacacaaccaacgcttcgcttcatagcaccgaacattgattccagcacagtcacgaccatcttctttgaaggcaatcgtgtttacgccccgggttctaaatagaagtgcaacaccttgtctaaggttggaagtgttcgaagtttctaacttaagaaggtgttgcactcatgggtcaacagtattcgcacctgtcgtccgaggagaggatcctgatcgagaagctgcattgcgaacagcatctgagcgtccggaagatcgcggaggaaatcggtcgggacaagtccacggtgtcacgcgagctgaggcgcggcctgtggttcgcgtccaacgagaacgggtcgtaccgtccctaccggccgaaacggctgaagaccgggccgtggacctcgggtccgttctattcggcgctggccgcgcagaggaaggcggacctgcgccggcgcggatcccgcaagccgcgtcgcatggactcggaccggcttcgcgcctgggtgctggactcgctgcgcagggggtggagcccggaactgatcgagggacggttgaaggcccagtacgccggcgacccgtcgatgcggatcagccacgagtgcctctgccagtggatctacgccaagccgcagcgggcgctggacctgcgccagtacctggcgcgcggcaggaaacgccggacgaggaaaaagggcaggaaggcgaaagggccgcgcatcccgatgcgcgtgcccatcgcggaccggcccgaggcggtcggatccaggaaggggttcggccatttcgagtcggacacggtggtcggcgccgcgccgtcgaggcgctgcatgaacacgcaggtggagcgcaggagccgcaggctgttcgcccggctcgtcgacgacaagagcgcgtccgccacggccagggccgaatactgtgttttagcaagttggcgtccgctttgtgagcggtgtttttccgcagtgtaggcagcgggttttccgcagggtgtgcggtatcggccgctgcctgtctgcgttgtgttggttatttggtcatgagggcgtgttcgcttcggtaggagcggccctcgaatctgatgagccgtccgtggtggacggtgcggtcgatgagggcggcggccatgttcttgtcgccgagcacgcgtccccatccgctgaattcgatgttggtggtgtagatgatgctccttgtctcgtaggaatcggaaatgatctggaagaggagcctgctgccctcctcgtctatgggcaggtagccgaactcgtcgatgatgagaagtcgggccttgccgatgctcgcgagttcccggtcgagccggttctcctgctgggcgcggcgcagacgcatgagcagtccggtcgcggtgaagaagcgcaccgggacgccccgctcgcaggcgagccgtccgatcgcgatggccaggtggctcttgccggtgccgacgggcccgtagagcacgaggtcctcgcatccggcgacgaagtcgaggttctcgagctgcgcgcgcccccagtcggcgggcatcttcaggttggtccagtcatagccgtcgagggtcttgtcggcggggaagccggcctgtttgagcaggcgcaggcgtttggatcgctcgcgcgagtcgagttcggccgtgaaccatcgttcgatgaagtcgagctggttgggcgtggcctcggcgagcgtgccggcgagcacgctgcgtgtcagggtcaggctgcggctcatcttcaggatgcgttcgcttttctcggtcgtggacgcgcgcctgcgtcgggtctccgggatcaccggatcgggtctgacgctcaccgttcttcccctccgtcgtccgtgccggtgatgaaccggtcgtagccgctcaggtcgggctcctcgatcccgccggggtattcccactcgccgtcgcgcatgcgcaacgcgataggggtgagcgtgtccgcgtgcaggcccatgtccctgttcgagcgcaggatctcgccgcacgcctgcatcgcgggatcgaacccggccgcccggcacgcgtccccgatcgctttgaggctctccctcaacgtcttttcgtccatggaatcaagccacgcgcgtatatcgtcgggcacgtccgggcggatcgagctttcccgccacgcgcggggtttgaccgcgagccggggaagcacgagcgcgggatcctccacattgcgcgaccgtccgtactgtctgggatactccgcgaagagctcgccggtggcgggcgatgcgagcgtgaccgtgtcccaccggatcgcggccagcaccttggaacgcgccgaatcggggccggcgaggtaccggttcgagtcgatgtcgaccagcccgtacttgtcggccgtccggctttcccagcgaaccgggtcgaacgccgtggacggcaacggcatcaacgcggccctctcctcgtcgaacacctcggccacgggcacgtccggcaacctcgggcaatacgaagaggccgccagcccgtcgcaccgttcaagcatgaaacgactgagctgcccgtaggattccgcgcgcatgggcggcaccatgagattgcgccgcaaaaacccgaccgcgttctccacgctgcccttctcgttgcccgaatacgggttgcagaaccggacctcgagccggtaatgcgccacgaacgcggagaacaccccggtcaacgcgacctcgcccttcgcgttgcgccggccggcaccggtcgcgttgtccatcacgatcacgggaggaacacccccgatatgctcgaacacgagcatcaggccatggcacagacactccgcgttctcgcccggcaacgccacgcacaaccgcatgttcgaatacggcaacgagaccaccaggcaatgcacgtccgccatctcgccagcgatccgggcccgggccacgccgaaatcgacctgcatgctgcccgccgcccactcgagccgcacgtacccctcgcgatccggcacgccgcggttcgcctcgcgccaccggtgcacgtaacgcatcgtggtcgaatactcgccgtcgtagtccgtctccgccagcagacggtcgtgcacgcgcctgatcgtgtgccgctgcttcctgggcagcagacgatcggcctccagccacccgtccaccagatgcgcgtacgggtcgatcttcgacccgtacctgcgatccgccttcggcttgggcgagcaatcctccatatccgcgtacttcgcgaccgtcccgcgatccacgtgaagacgccgcgctatctgcgcgcgcgacattccctgccggtcgagtctcctgatatcttgcacaatgggcatcggtatcgccatgttcctttccttcccgagcgccggccggcggcaaccggccgaatcaaaaccgaatcgcaactcgggaatatacaggcggcggcaccgatgcctctcacatcaccgggaaacgatgacgacaccggggaaaaccatcagcccacactacggaaaaacactgccgaacctgtcgaacaaacattgaagcaaaacaccgaatacgagatcttcaaggacatcccgccggccgcgcgcgtcgaccgcacgtgggacaacggcacggaggcgagcctgcacatgctggtggacgaggcgctgggcatgctcacgtacttcgccgacccgtacagttcctggcagcgtggcagcaacgagaacaggaacggcaggatccgccgctatctgcccaaaggaaccgggttcgaggacttggcccaggaggacctcgacgcgatcgtcggggagatcaacgacacccccatgaagctcctcggctacaaaacgcccaacgaggtatgggacgaggagatcgccaagctacaatcgaaggcagccagcccgaacacaagcgttgcgcttacaaattgaatccggggggcctcatgagccgagggtgtaagggataaggtgtaaagggtaagggtttaaaggcgtaagggtgtaaggggacactcactcctgccggtacagccgcgaatacaatccgccggcctgcagcagttcgtcatgcgtaccggattcgacgatctgcccatgatccatgacatggatgcggtcgaaatcccgaatcgatgcgagtctgtgcgccacgacgatgcacgcattgtcggagtcgagcaacgccgtcatgacatgtcgctcggtatcgttgtccagagcactggtgggttcgtccataagtaggaagtccggtcttccgacgaccgcacgcgcgatggcgaccttctgccgttggccgccggacaggttcatgccgcgttcactgaccatggcgtccaagccgacgaccggatccatcatcccctcgttgatgccggcaacctcgcacgccctgacgatgtcgtcatccgtcagccacggacggtgcagcgtgatattgtcgcgcaaggtttcgttgaacaccgtggattcctgatgcacatacgccagcctgccggccttccatcggctgtccgcgtcgtaaatccggcatccgccgccgttgatggtcaccgtgccacagacgggttcgatgagtccggcgagcagtttcagcagcgtgcttttgcccgagccagtggggccgacgatggcgatcttgtcgcctttgcggatgtcgcaatcgacatcggagagaacgggagcgtcgaacgccgtgtacgagtatcccacgccggtggcatgcaaccgttcgagtatgccatcacccgattcgtcaccactcggcccaccacatgcggaccgtccgccgtcacccagtccgacgtcacccggttcgccacccggttcgtcgcattcaagcgacgcaccgccgccttcaccggcgggaatcatctcgcaaatcttgcgcatataggtggcgaacgccatgatctggctgatgacgccgacgatgccggagaatggcgtgacgaatgcggacgccaatgacatgaatccgacgacggcacccagtgcgagcgtgccgcgtcccacgaaggtcatgccgaaggcgaccacgcatagcggcaacacgaacaccagcgccgaggacaggcttgacagcaatgccgaaagccgcccttgccgagtctggtagtcgagctgcgctcccagacgcgctgaccagcggtcgtagcagtggctttccaaattgaggcttttgacagtttcgatgccggagaaggtttcgatgaaggcgcgttgcacgtcagcctgcgcgacggtcgcacgctcgaccagcgtcctgttgcgcagggaataaatgacggatacgacgagcaccgccgcgcacaccgtcagggtcagcatcgtcaatggcactgaataggcgatcatcatgatcaggtagaccacgaggaacaccatcgacacgaccgtcgacggcagactgccggtcacgatctgttcgacgaccatgaccaggttcgcgcggtagatcaggtcaccaccggaacggttcacgaagaacgggaactcccgatcgagcacgccggtcatgtatcggcgggacaggtatcgtccgaatcgcacctgcacgcgggtgagcatcacggtgttcaacgcgccgaccgcatagtagaccagcagcgaggcaagcagcatcgtcgcgaccaacggcgggaaaccgctttgggcggcgagcgacccatggtcgaccatatagccggtgcctgcgggcacgatcaatgtcagtccctggacgacgagcgagaacagcaggctcagaccgatggcgggcatgttccggcggaggaacccggtcaggatggagacggttccgctgcgaggccgtatgggaatggttgcgcagccgtcgtttgtcggttgcggaatcagcaccgcgccagaacagtgggccgcgagttcgccgggcgtataggcatggcgcccgttcgccgggtcagcgatgcggaatcggccgtatgcgtaatggtcgagcacgacgaaatggttgtcgtcccaatgcaggatgcatggcgtcatgacggttttcaacgcttcggcgctgggggtcgtgaccgcgcgtacgcggatgccggagtcggacagcaccgttacgatgttcgcgaggctcagtccgccgcgtggagcgccgtaccggcggcgcagctcgtccatggtcacgggatgcccgaatgcggcgaggatcatcgctgcggcggccagcccgcattcgctgtgctcgccttgttcgataaacgggacacggtgacgacgccatgatctcatgcttgccgtccgcgcgcgggaaggccgaagtcgacgtgcgtgcggtcacgcccgagcgtggacgccttggtgaacgcctcatagtcgtcgaattcggcgagcatcatatccttgacgaggtgtttgtcgtcaaggatgatgatccggtcggccacattccaacagtattcgaggtcatgggtgacggtgagcaaagtgcgctcgtcggcgcgaagctggttgacgtaatcgacgagcagcgagcgggtgatcggatcaatggcgttgcttggctcgtcgagcatgatgacatgcgggtcgaacagcatgccggcgacgatgccgacccgtttgcgcagaccggtcgagagttccgccaccttcttgtcgagatgcccctccaattcgaaggcacggacgagcggctcatcctccagccgtttcgagtcgacggtatggccgccgtccgcgattcccttgccggaccggaacagcagttgccggaagtggatgttgtcacgcacggtcatcgtgccgacgagattgccgttctcggtcatctggaacacgtcgcgcatcgacggcacccgacgcctatcgatcacgcatcgcccttcacgggggcgcagcagtccgacgatgagtctgaacagcgtggtcttgccgacgccgttgtatccgaggatcgccagcgactggccttgcggcacggtgaagtcgatgtcctccaacacggtctgtttcttcttgtagccgaaggtgacgtgttcgacggcgatgatggcatgttcgccgttgtcggtgcggtcggcgtggttgatgtggtcggcggtcatattgtctttccttgtcgtcgattcggttgtgttcgtatccgtcatgtccgtcatcgcgtttccagtgcgagtatggagggcgtggacgggtcgttcagacgaagcatcgtgtaggcgacgccgaccggcccttggaagtacgacagatccacgaattcacgggattgcctcagccggaaacgtcccgacgaacgggcctgcgcgatcatgtcgtccatcagacgctgtgcctgcatgcgataccattcgtcaccgttggcattgccgatggatatcagggtgtcgatcatgccgcatcgtccatggcacacgccgtcgtcgtcccaatccgcgttcccaagcaacgccgtgatatctgccttgtctgggaacgcccgtccgttttcatcctcgaagaaacgttcgccgtccgcgccggcagtggccgccagctcattgcgtgcccagagcacgccgaccttcccacggcaccatttgccggcgtcctcctgtttcgcaccgcttcttcgagcgtccgatttccgccaaagcattcgggcgaattcggcgaattcgcgattccccgtcgccgcgtagagcttccagaacgccacggccatgccttccagtccgtgcgcggcaccggttggatacggcatgtcatcggattcgtcggcgttccgctgggtttcgggaaacgcacggatgacggttctccccagccggctggtttgttccactatgcgcatgtcatggaatacgtcgtacagccgcagatacagcatgatcgaactgcccgccccggtcaggtaatccagatggaatgacggttgaggattgtcgcgctgcaggagcttcggcagcatatcgtcgatgtatgccggcagcatacgaaccgtctgcgtcatgcaacggcgagcttcgggcgacgtgatgccggcattggccatgcgtaacgcgcaatagcttcgcgacaggccggaagtgaagccggaatacgtaatgcctctgtccttgcggcgcatcagactccgcatcatacgcgtgcacaggtcacgccagcgctcatcgtgtgtccgccgatacagttcggcggcgaacatgcccgtcccggccatgccgtcgtagagtcccgaagtcggcgcccccggttcgtaccgttcatccacggtcttgtccgcggccatggtgtcggatcggttcgctgtaagccatgatacggtgccatcggtttcctggaggatggccgtgtcggctatcctcgtgccgagttcgattgggtaatgctccgcatccgtgtccgacgacaccgaagccgtcggatgcgcgtcctccatgccgggttccatgcgcaaggcgttgcggataatgcgcgattgcaatgcggcctgttcgtcaagatgcccgatggtgtcaagcacccgttcgcgtaccgaacgttcgcagacgccgtcaatggtcgttccatcgggagcgtgcagatcatgtcccgtcagctgtgcggtgaacatggggatgtccccggcgagcatctgccggtattcgcttgcgaagatgcgcttgtcacggaatgggtagacatacaggttctccagtatggcttcgacgtccagcatgtccttcaacgccgacggatgatggatgaaatccgcaaatcgggcgtaggcgctggtgttgcgcaccagcacacgcacggtcgtatcctcgccggacagcatcgcatcccattcatccgcgtcgatggtcatcgccgcggcgaccgtattgcggaatccttggagaatctgtcgcttgtaatgatacggatccacaacggcgtcatccaatgtcaccgcgcagccgtccttgctgaacgtcacggcgttcctctcgtaatgggcatcggcggagtccaatcccaccggggacgcgacgatgccgggcatcgtctgctcaccggtttcgaaggcgctgatgtcgacggatgtaccgtcggccgacatcgccgttttcgccggcaacagacaggaggatgccagtgaatcccgcaatatcgtggatacgcggatgtcggcatcggtgccgtcgggcatgtccatggtcacatggttcgtggcgatcgtctcgaaatcgacgaccatcggatattccccgctggcgatgatgttctcgtggtgcatgtcgtcgccgtgcaggagccataccaatccgagcagctgaccgtatctggtgtaatagcgctccacctgacgtgcatcctcgcaggtgccgtgttccacgaattcctcataggcgtagccggatttcgtcagcacgtccgacactcgcatcggaaggaaacccttcgtccgttcgcatcgcctcaccaatccggcgaaaagctcatggatatgcaggtcacgcggcttgtatacgattttccgtccgccgatggtgagcatggccacggctcttccaccgtcgtgcgcgtcgccacggtcgatggacatatcttccaatctgaaatcatcgccgacgcctgcgaaggaggcgagctcgtcgcgatccatggatacgcggtcgagcatttccttgacgaaatcgatgtaatggactgtcgtctgcgtgacaaaacgaagcagtaccggatatttcgcatacatatggccacggtattcgtcggtggccagcagttcgaaatatcgccgcaattgtcgcttcgcatcgccgtcgcccaacgaaccggcctgacgtgcgacatgcaattcccatacgacggttttcaatccgatgcccaacagacgctcgacgtatgcgctcaggcactgttcgataaggcgctcgtcattcatcggcaatgaacaggccgacatatacgcttgcagttccgctttcacgtacgcgacgaacggtgcgaaggcggtggcataccccgtgcgttcgactcgctcttcctcgctgtcgtaacggttcagaatcgtctgcagttcaacggaccatgccggctcgacatggccgctcagtttccgttcccgatccgcgatgacggtttcgaccacggatgcgtcatcgccgagcgcgtcggcgatgccttgatagtcctcgtcccgcagtgggttccgtcggtttttccattccaccgttgccgaaagcatgtcttccgcgtgcgatgcccgatactgtcgcaaagcatccggcatagcggttgccgccatgcaccgttcctcaagggtcgtggcagaagccgcccaggtcgttccaacgttaccgttcatggaaagtccccctaccgttcggcgtggacggattccggcagcttccgccgcgtttcgacgtattcatggaacgtcgcgcagtcgaacatgccgcgttcccgccaataccgcgattctgcatcgctaccgtctcgtcgggcgtagtcacgcttgtaggattggaatgccagctcctgcctttcgctggtttcaggcacgacgccatcccgcagtgtgttcagcgcccgcacgatagccgcggcggtctgatcggccattgcctcatcgaatggcgtaaaagtggtgtggtatgcggtttcatcaatgatgatgcccagtgattccatgaaccgttccatcagttcgccgacttcaaggaacccgttggttgtggcgctgaccattgccatgcccggtttgcccgccagatggaacaaatgcccccaataggtgagtcgatccatcagaatcttcatgtcgccggaaacgttatggccataggtcggcgaaccgagaatcagataatcgcatcgttcgattgcttttttgacccgggcggaatcgtccagtccgttcagctcgatatgatcgacaccggtggaaaactcgctcgcagtaccatccgacggcaagatcgtcgtgtcattcggcgtcagaatcgtccattccgcgtcaatgttcgcactgaccgcatcctgtatcagacgaaccgaccgcaacgtctgcgactgcggattacgcgaagcgacataggccaccatgctggtcatggaaatccacctttccaaaagcttcgaatccagtagatgtcacagctcgatattggtgttgataaaatatcgagagaatactccggttgaaataccgatggcgaccactaccaatacgacataaccaaccgagaacaggcacagcggcatcacgttgacgatcacaagcatatatgccaattggagcaggaccgcaatcaacaccaaaaccagttgtgccattgtcggatcgctgttccgggagacataaaccatcggcattgcgcccaaagaacagacgattgttcctaagactgatacgataagagcaccaattgcatcatctgctccagcggttatctgaaagcctgatgacaaaacacgcataaaagccagattcaaaagcacggaaatcactgtcaggataacaggaaacaggcatttacaccagcagtagctccaataggaacgaccagactgtatatagagctcaaacagtccatctcggaaatcctgatacaggatggagaccatcaccgagcatgacgaatagatgaaaaacggtccaaaaaagacagcccaagtaaatgggtctagaatgcctgcgccactggcaaccatctccacgaatattgccgtgaccataatgataagaaccataccccagttcttgaatgactggaaacatgccttgcagtcacgaaacagaatcgccttcatgccacttccccttaacgataacaagtgtcaggtatgggtcggatgttttacgcaatccatacctgacccatgtaaagcaacgttcacttgcagttcccacaggatgcaagtcgggtgacgaccgttgccgaacatgccgagaaagacacgctcagaacggaaaccgcgaacgacagcgacgccggcgcgacgccatcatcgttgcgaccggtcagcatcgccatatcggccgccgacagatcctcgaaggattcaccgacaatggacttctcattgatgctcatataggcctccttacctaattcctgcccttcaggcgaagagctactgtaagcatgacgcgctttctcccgcttcgcgatgacttgtatgccattaggggacaaggacttttatatgaatccatgttgtgcaatgatcattgacacaccccgacgcaaaggaaccctcatgagaacaccgcttttaatacttacggtacttggtttgacattcggagcgtcagccagcactccaagcaacagttcaacggaggaagaaatatcaacatattcactatgccctgtatggtttccattatgccatatcagaaattaggtcagtagcggtaacatgcaatagaaagaccattcttcgccgtctttttcatatctgatgaatcctccttgtccagatatcaaacgggaatatatacttagcccttttcttgctcccaaagtcacacatcgccgactcttttgtcgacatttattcacctgaacaatatcaacagcattatttgaaaatgtgacaatgacggaatattcacttttgtcagcatagcgttcaatattcgtgtaaatttcacgcaacaggttaacgattatttgattccacgagttcaacattgcgctggatacaccgcgaagagatgaatgaccgcaaaaccctttgtcatgcaaccgacggtcactttcactcaatgtagcttgaatatgttcggcaagacttacatgaaatacatcatcttgtttatggtcatcatccgatagataattcataaccgaatgcagatcttggaatatcctattgataccgttctgcaattttctccatcgcttaagctcttcttccttcgatgcatcaataccttcctgcactatgaccaacattcgtgtcaactcaccagacatggcatcatgcatcccctcagcaagctgtaagttatatcgaacaatttcagctttcttttctaactcttttttcttttcaagtccgttcctttgccgtagccaaacccctaaaagaaacacaaaccaaagcaacaccaccaaattaatggaaccatcgaacgaaccaaattcactattctcccgatatatcgcataattcagcaaagcgctaatagacaacagcaccgttgccgtcacaccattccaccaaacagcagcatagccttgaatcgcaagagataccagaacaccccatgactcatcgcattgcgataagcaaggcatcaattcattcaggaatgcgatgacgataatcccccatgttgccggtaccggatataacggcaacatactcacagcaagcatgtacacgatgcgaataaacccatcattcaaactctcaggagaatcaagaatccattcggcgatacatgcggcaagacatgtcatggccactatcgatagaacaagtttttttttcgatactcccaagcatttcttgcgaaccacaagtatcgttttcattgccaatcgtctcaccatcgttcccgcctccaccaataggcaatcagttcggctctggaagtaagatggagtttgttctgaacacggtcaagataggttttcaccgtccctgccgaaacatccatcatccgggcaatctgagtgggcttatacgactgtgaatatagttccatggcatatttttcccgttccgacaatctttcgattctattcacgggaagtcgaaccagacgatgatatgcagcatctacatcctcgaatccaatagtctcccctcctactcgaacacagagagtatgaccatcgctgacgagcttgaccgctttacacagtgctggaaaatcagcttttgacacaatgccttgagcaccaccctcagcagcacgtcgcgcatagcgagttaaactgaacgatgtcaccgccagcaacggcaacatcctgttacgacttctgatttcccggcacaccatgtctccgggcatgtcctccagactcatgtcaaccagcagaatgtccgcttcatttgcgggatccgtcgcatattccagagcatcggttccggtattcgccttccaagctaaccgaacattcggcagatgacgcgacaagaacgctgccaaacccatcagcacgaagtcgtcgttatcgactatcgccagtctgatttcatttgggttccccatagtgcacatgatagacgtttttcgtacggacatgcccgccccgttgtctaattgaaagtgcaacacccgttagattggagattgtccggataaccagtccgaagggatgttgcacctatgggggaagcatgttcgcacctgtcggaagaggaacgccaggtcatccggatcgagatcggcaacggcaccagcatccgcaggatcggtctgatgctcggccgcaacgcctcgacggtcggcagggagatcgaacgcaacacgtggttcccgtccaacgagaacgagtcctaccggccgtaccggccgaaacggctgaagacgggcccgtggacgggcggatactacatcgccggccccgccgcggcgcaaggccggccgcaggcgcgccgaaccgcgcaggcgctaccgcctgtcatgcgaacgcctgtgggcgcgggtggccgaatgtctgggttgcggctggtcgccgccgcccgtcagcggcaggctgcgcgtcctgttccccgacgactccgccatgcgcgtgtgcccggagaccgtctaccgttggatctgcgccgaccgccatcgccgtgaacgccgggcgcgctgccttccacgtggccacgggaggcgtcgcaggcgtggcggcgggaggacgtcgcgtttcccgattcccggacgggttcccatctccgagcgtccgccggaggctggcgaccgcagcggtttcggccattgggaggccgacggcgtgatcggcgccggatgcaacctgcacactgaggtcgagaggaagaccaggttcctcatggccgggatcgtgcccggcaggaccgccggggaaagcgtcggggtgcggctggcgatgttctcgccgctgccggccggcgcgcgcgtcagcgtcacgcacgacaacggcgccgggttcgcccgccacacgcgcctacgcgacgggctgggcatggacacgtacttcgccgacccgtactccagccggcggcggggaagcaacgagaaccggaacggcatgatccgccggtatctgcccaaacgcagcgagatccggatgggcatggccggggaactgcgggagattgtcgacgaggccgacaaccgtcccatgcgcgtgctggactaccggacgcccgccgaggcattcgccgacgaactgctataattgcaggaccaacagggggtgttgcacctctaaatagacatcgggcacacggtttgcgcggcggtgagcagtgagcggtgagtactgagcgacgtacggcgactcacgtgcgctcacacagtggtgagcaatccgccaaacaacaccacgagcagagcgatggtttcaatcacgaagtacagaatgaaacttgcccagcttttggtcagtacgttcagcggcgaggtcttccggataatcaccagcagaccaacaaacaccagggcatatacggcgatgccgatcgccgcccccataatgccgaggttcgcggcattcgccagaccggcctgcttgccgtagaccacgtacgtggaataccagaagttgagattgagcatgctgagtcccgcgatgaactgctcacaggccagcccgagcacgaacacgatcagccatggccaggacggcgagacgaccaccgccatcgccaatccgacgtacgtgatcaccacggccacccaaccgaccagtgcgataccttgcggagacactcccccgagcacggccacaatggagtcagtattattcaccgccagcgagcgaccgaaccagtatggcgcgatgatggcgcacagtacggcaagaatgatcaacgcccaacgcaacggatgggagcgacggcgctcgatatcagccaaagacaaatcggtctcgggtatggaagcctcggggtgcctggaaacctcgacggtctctactttgccgcctacgatttccgtcgcctcgttaggttcttgctcgttgggttcctgctccatgcaccgcctcgccgattacctgctcattgccatgtattgccatgccgattattgcgatgcctatcttagcgtgcgtgttgggcaagtacctgatgctccctgcggtttcgcgcgctgattggatacagacaggctactgctactgcccgtctgcatccggcgacttgtccgccgctgtatccgtctgttcctcaggcaacgtattggcagcctgttccttacgccgcctgccgtgcagcagggcctcgagcatgtcgacctgacgctccagttcgtcgatacgacgtacctgctgcgaaatcagcaagtcgcgtaggtcattgttctgctctttgcgggagacggggaagatgatggcgcgacgttcgggcgatacgtggaaatcggattcgctgccggtaccagccggaagtgacgattccgccgagtcgcgccaagctctcgctgctcgcgcactctccggaatgtttggtgcgcccgcggctcccgagcggaaaagctccgaatctgaagccccccccccagcttattttccacgccggctttggcattgccggagttcaggatttcgtcttgcgattcacgccagcgggcaaggcaacgttcgatgcgcttgtacccgattagagccggatccaatccggcttcacggaacatgcgcacgggtgaggcaccttcgttgtagtggactacacagtaacgcttgaaatcatcggtataggtgatgcgcttcgccgtggcttccgccactgccgacaacgacttcagatacttgatctcctcggggctaaaagtccctccaccactggtcatcctcatcccttacactcgttggaaggctcattgcacaccccccttgattatggggtgaatgccatagttcgggatagtaatacttataattcggacatgcctaacccctagtagggtcgtttttatccccgtttaagtggagcctgagtagtggctggacggcaactgaacgataatcggcccacgaatggggtatacaggcccatccttcacctcccctacgattgtgttcgcttggcgattgttaccgagcctgcgtgaaacgtttgttgtggtgaaacacaagttattttcgatgcccggccccattacattcaaatcaaaatgccatacattgcccataagattcggagatggtccacaagtcatccgtctgagatgccgccaatatgacaaatggccgatctgaataatcagatcggccattgttatagctgctcagttataagcagcagtcaagctcacgcgttgagagcgcgcttggtggaacgggacttgacgaacacggtcaccgcggcacccgcgatcagcagaccgatcacggagaacagcatggttccggcggcaccggtgagcggcagctgggtgatgttcttgacgttggtgacctggaaggtgcccttgttgtccttggacaggttccaggcatccttaccagcgaaggtggcagcagcatctgcggttgcaccggtagtgatcgtgaacttgccaacgaaggtgccgttgtagccagtcgggaccttcgtctcaatcacggtgtaggtggtgttgagcttaagaccgttcagagtgtacttaccctcagcgttggattgcagtgtgtccgtggcgccttcagggtaaatgccatcagcattggcggtcggcagagaatacgcaccgttagagccattgaacttaagcggagtcttcgctttgagctcgtcagcggacagaccgctaacatcgccttcgtacacttggaactcagcaccagtcagagcagcagcgttcttgtcgactttctgccaagtcacggcaccagccttggtggtttcttccttgctgctcttcaggtcgacaacgccggcagcggcgagaacgccagtggcgttgttcacggacggcgcggcgcccgtgatagcagtgccagcgagaatcggagcattgccattccacacgagcttgtgagtgtcattatcttcgacgaccagctttccactctggtcgacaatcaagtacagaccaccctcagcgaaggtgaaggtctgggtcttgccaccgttagaagccgtcggggtaatgtccgtgacagccagatccttaagcgcgttcacaaaagcggtggtctgcgcggcagtcagggtagtgttgcccagccaggcccactcgttcagggaatcacccttggtctggtcgttgtaaccagcagcagcgaaagcagcttccactgccttaccggagaccaaaccctccagctcaacgccagtgttgccatcagacacatacttggcgagctcaacgtacttgaacatgcgcaggttagcctgcaggtcagcggtgtcaaccggcttggtgtagaactggtttgcatccgtggcgttgactgtgatagtcgtgccggagatgttggcctcagccgcgttggcggtggtggcgccgaaggccatgccaccgagcagggtggccgcagcagcgacacccgcgaaaagcttcctcaacttcatgagaaaccctctcttccttattgtgattgattttcttgcaatcgcggaggctgcagacccacagcagggcctccgtgatccgcaaatccttattgttttttcgggagggaagccttcattgcccccctcagtccgccttcggcggccagctcccctcagcgagaggagccaaaaccacctcaagtttcttgaaatcagaccagctgacgcttacgccaaaccgtgtagcccgcagcagccagcagggccagcaggcccaggccaccgccgaacaccatccagtcacgaccagtcgtgccaccggtcagcggcagactggagatagccacatacttgttcgtgaactgtgccgactccgtattcgttcggtcggaatcgttctcgccgtactcgtaagagacaacggcatccgtcctggagaccgtgaccttgacggtcaccttatcgttgtcatacttccaaccggcagcaggcttttcggtgtcctccgaagcctcgaacgtgtagaccaaattgtcagcaccggtcggaaccctgaacttcaggtccccattgccgaagccaaccgtcgcgctcgcgccgctagcagtcaattcgtccttggacacagtcgtagtcagtccattgttggccaagccggtaacgtcagcgcacttaccagcattcgcatccgtgctatccacgcacttcaggttgaagccgaagtccgaattagcagcatgtccctgcacaaccttcgtcaccttgacatccgaagcgggcaaggtcacgtaagaaggcgtgttggttaccatgaaggcaccggattgtgcggtcaaaccttgtagcttgaggtcagtcttatcaaccttggagtcatagccttcaaccttgacctcggaaaccgagtatgtgtgcccctcagggccggcaggcaccgtgaactcgtgagtccagttgccggcggcattcagagttgctgaaccgttggcataatcctcgccgtcctgcttgagctggacctgcacggaatcattcgcgtgattctcgttgtcgtcggaccaagtcttcgtcaccgtaatcttggagaccggaagggtgatggtcggcttctgcgggtaggcggcggtctgcggatcgctcgtcgtcgtgccgccctgcgaggaggtcaccacggtcttgtagtcgacggtggcgctggagttgtcgttcgtgtagaagttgttgtcgccggaggcattggcatcgtccttgtggttcttaacagcctcgtcgaacgcagcctgcgtcggcttgacattgaagctcaccgtgtaggtgacgccgtcctcaagcgtgtcgtcgttggacgtgaccggccaagacacggtgccatcagccgcaaccgtcgcctccggggcgtcagcccacgccgtggtctggcctttccgggtcttcgtgtacgtgaagcccgcgggctctccattctcggaggcgctgtcggagctcacgacccagctggacagcctgtcgtgaatcgtcacgtcggcatactcagccgtcttggtgatctcctgataaatggactcgaagatgttgttcagctggccggcatccgtggcggccttgtagtagctgctggtctcggcgcggtcaccgaggttggcgttccaagactttccccacaaatgctcactgctcgttgcagtggcatccgggtagttgctggagatgccgtgcatgtacttgttcaggttgctcgaggtgtcgccggggttggcaccgctgacgacgccgatcgagtagatggtcgtcccggcgtccttcaggctcttcgccttgttcaccgcggtggcggcgacggtggggtcaaacccgctgccgtggttcggctcgccgtcggtgaagaagatgacgaccttcttcgcgttggcgcgaggctgatacgttagcgccgcctgggcgcggttgaaggcgtagtcggcggaggtcgcgccggacgcgctcaggccgttaaccgtgctcgtcagtccggagacgtcgtacgtcaggttgctgacgatctgcgtgtagttgtaggaggaccagccttcgcggtaaaagtcattgccgacgctggtcttctcggtgccggcgaacttcaccagggcgatgcggttccgctggctctggtcggtaatcttcgcgttctctgcagccgtcgcattgatgaatttattgaccgcggtcttgagcgagtcaatcttcgtaggctggttccaaccgctagcgatcttttcggccatcgaaccggacacatccaacaccagcacgatgtcgagtggctggttcgtcacgatctcgcccgtacccgcgctcttcgcaccggtgacgttcaacgccaccgtgtacgtgccgtcttcattggcggtaacggtcttctcgcgggccggagcagacaacgtcggatcatccggcacgccgtttgttccctcggtggaaagaggagcaggcgcgctggcggccgccttctcatcggtggtctgcgattgtgtcgtggaggcattcccatcgtccgccatggcggtcgcgctcacaccggcgacgccaccgagcatcgccacggcggcaacgatcgccactaaccgtttgcctttcctgcccgccgcggcccctaccgctgcgaaccattctgcaattctcttcataaccttgcctgtctcttacgatcacgtacgccaaaacccggcgttacgcttataaggcgttatggtattaagcaaaaagcacgaatgcgtacacccgggtagagggaattttttacccgacactgaaaagaaccttggaatttttgaaaagtggcaccctcgtcatccaccctgcgataacgcacttttcttctcgacggggcgtgccggtcccaccatctgggaactgaggcggatttgccgccgctgcgcgggggccggagttactgacgaccgtcagtatgccactgctccgcatgtgtgcagtatcacataccgctacgcatacacggagacatactacatgcaatttctgtgaacgcaaacatacgactcaccaaggccgtgttctgttgcgggcggtggtgttacgggcaatgttgtgggtagtaccctagccacaaacctatatagtggagcggatgacgggaatcgaacccgcgtaatcagtttggaagactgaggctctaccattgagctacatccgcgttaagcgtcgcttttggcgacttgagttattatacatatttcttcggggatggcaaacgcgtgtggctgcagcaggaccagcaaatctagttgatggattgcggctttgccgaggactcccctcagtcgcctacggcgacagctcccctcaaagaggggagctggaaaccgtcgaaatcacaaatggatgagctgggactcgtatggttggaggtcggcgcccatcgcattcagaatcacgaaccagcagttttcgggcagcgagtcgagcttgtcgatctggttcttgagcaggcgcacgtcgcggctggtgagcgcgccccacaggttaaccatgatggagacgttgtacagcatgtagcactcgggggcctcgggcgctattccacagaaatcgtcaccaccgcggaggcaatcgaaccatcgtggctcagggaaatatggatatgcggcatcgaccccgcaccgatagtcgagcgctgcgccgaacgcgcattccgccgctcctgcatcactgcataaggcccgttatcggaagcagaggaataagcagaggaatagcgagcgccggcagccgaattcgcgtaatcagtttggaagactgacgccgcccccttacccagagacacatgcggcacaccacgggaatcgtccaagatctcgatttcaggccacgggaaattatcaagcgtgaacggatagggggcatcgccaagataatcgcaccaggctttgaggaacgcctccttgcccgcccatttggcggccagatggacggcctccccgtcattcttctggcgcgcgcggtcggatgcctgccgcacctcacgcacggagaacagcgcacgcatgcgagaccccggctccgccaactgttcggcgaatgcggccacatccaccacgtcatgccccaaaccacaagtattcatgcttcctattgtgtaccgcttcgcgcgtaatctctacacctcatcagaattggggcctgatttccatttcagggggaaaagattcactatgctggatgacctcgcgcaataccgcaaacatcttgggctggctgcctagccgtccaaaaaaacatccgcgccccgccccgaaggtctatctccgtttcgaggggcggattttgaccgttccggaggtctacttccgtttcaaggggctggtcatcctccataccacgagtatccgcagcataacgccaacgccattccgccgtttttacgccttgtctacttgggtaacagccccttgaaacggaagtagacctccggcgaatgccaaatcagccccttgaaacgcagaaagcccactccgagggaggggctttcgtatgttctgcatatttctctcactgagtttgtgccagcgagaaagctccaggggaaactcccctcacccgcttcgcgggagctcccctcaaagaggggagccgagatccggtgcgctactggctcccatcaaccggggggagccagagaatatcaggcctcgtagtagccgtcggcaccgaggcgggcgtccgggttgaggagcatcgccttttcgacctcgtggtggtcgtagccacggtgatcctcgcggaagcgacggttgtcgatcggctcgtagagcgcggcgcgacccatcatgccttcctcaaggtgacgctggccggcagccaggcgggcgttggcacgctcacgccaagcttccagtgcggcctcaccatcggccttggccacggccgcctcgaaggcaccggggtgaaccagggccacgaagccggaaacatgtccgaagccgagcgaggtggccagaccggccttgaccgggcgaccagcggtctcgcgaccgaactcgtcctcgccaccgccgatgcgcaggggcttcctaacccagaccatgtggtcgtcgcgctggagcttcggatccacgcagtcgagcgccgcgttcgccggaatcacgccggacttgaacagctgcgtcagaccgttgacctggaagatgcaggcaccacccttggcgtggccggtaagcgtcttctgcgagatcacgaacagcgggttgccgtcggtgcggccgatggcgtgggccagcgtgttgtgcagctcggattcgttcgggtcgttggcgttggtggacgtgtcgtgcttggagaccacggcgatgtcgtcggctgagacgccgagcttagccaggtcgtgcacgagcttggagtccttgccaccgaggccggcagccagggcaccgaggcccggagccgggatcgaggtgtgagcaccatccgcgtaggagtggatgaagccgaccacggccgcaaccggcaggccgagcttttcggcgatgtcaccgcgggtcacgaggatcgtgccgccgccctgggattccaggaagccgccacggcgacgatcgttcgcgcggctgaagaagcgcgcgtcgatacccttgccatacatttcctccgagttggcggtggcgttcatgttgccgaaaccgatcacggattccacgccgatgtcgtcgatcgcaccggtgaccacgaagtcggccttgccgagggcgatcttgtcgacgccctcttcaagggagacggctgcggtggcgcaggcggagaccggctgaatcatgttgccgtagccgccgatgtaggactgcatcacgtgagccgcgaccacgttcggcagggcttcctgcaggatgtcggtcgggatctcgtggttgaggaagcggtcgaggtacagcttgcgcatcgacatcatgccgccgaagccggtgccctgggtcgaagccaccagcgaggggtggatggactcgaggatttcggccggggtgaagccggcgcccaggtaggcgtccacagtggtgacgatgttccacagggcgatcttgtcgacgtcgccgaccatcgaggcggggatgccccatcgggtcgggtcgaagcccttcgggaactggccgccgaccgtgcgggtcatggtggcgcggcgcggcacgcggatcatcgagccggcgtggcgggtcacgttccattcgccggattcctcatccggggcgatggtggtgtgagcctcgtccaacttgacgtattcggcggcgacttcgcgggtgggcacagagaaggtgacgtcgtggtcgaggaagacctcggcttcctcttcgtcagcaccgtccttgtagtcgttgcccatgccttcctcgaacgggcggatgccggagcgggccacgacctcgtcgtggtagcgctcggcgatgtcctcttcgggcacgaggttgccgtcggtgtcgtaccagccgggcttcgggctgtcggcccaagtcagcagacccatgttccacgcaagttcgagcactgcgccggcgctcaggtcgacggtgccgtccgagtggatgccgagctcggcctgggcgcgcgtacgaccggagccccacgggcccagctcaccgacggaaacgatgacgatttcgtcttccggcttggcggtgacgttggtccagtcgttgaggtcgaccgaagcctgcttggtgacgatcggggtgggcagcgccttgatttgctgcccacgcgaggagtcggacagtccagtggactttccggcgacggagccatccgtttcctgagacgaggccgcagcagcttccttctcggcgtcggccatggcctccgcacgcagggccttgatgtcgatgggctcggaaccgaggccaccggtcaggtccacatcgagcggggccttgagggcctgctcgcgcgattcggcagtgcacaggtcgagcagcttggccgcaatctgtgcggtggagtaggtgcggatgccgtgacgctcaacgacggcgaccagcgggtcgttaccgcccatcaggccggtgccacgcacccagccgatcttcgggtgagcgaaggtgacgcggctcgaccacaccttttcagcgcgggcacggttgacgatggcgtcaaaggcgctcttgacttcgccgtaggcaccgtcgccgccgaatacgccgcggttcggggaaccgggcagcaccacgtggagcttgtgctgcacgttggtgtcggcaccgatgtggctgaagccggcgatggcgcgttccacgccccacagcatcagtcgggcctgcgattcgaacaggtcgccggagtcggcgagcgtgccatggaccggcggagcggcgaacgggaagaacagggtcggctcccacgcaggcttcagaatcgtggtggtagcaccggaggtcttcttctgctcgtggcccacccagtcgaccagtgcgtcgacgtcgcggtagctggagaggttggccggaaccagccacagcttggcgttgccggtagcgtgctcgcggtaggcctgcttagcccaagccttaatggacggcttgaagctgtgcgaggtggccaccacagtggcaccgcctgcgagcaggccttcgaccacctgagcggcaatcgagttcgggctcacgccggtgacgatggcgatatcattcgcgtaacgggaggcgttcttgttggacgcaacctgttcgagggcctcggagccggccttctggaaggcggccttgagttcttcactctccgactcgttggcgaaccactgggcttcggcggcgatggtcttgccaaggccgatgaagctgccgttcagggcggcgggatcgttgtcgtagtaggcgcgggcgaggtcttcgcgggcggaagcccaccgatcatcgaagaggatggccttgttggcgtcgaagcgcggagcgacctgcttgggccagtcggagccaagttcggcttcaaccgcggccacgacggcggcgttctcgtcctcggattcttccggagccggagcggccacgccgagctcgttcagcacgaagcgggcggtggcggcgagcacgccgttggaaccggtgaccttctcggcgaaggcgtcgagcgcggcggaatcgaccacagcgccaccagcggcaccaccggcggacggcagggccacggcaacacccttgagctgggcgacgacctcaacggccgcatcaatcagcttgtcggcttccggcttgttctgcacggcggcggtgggcagcttggccaggtcgccgccacgggagctggcaccctcgcgagtgtcgagcagcagtgtggcgagcacgctggccacccaaccttcaccgagctgccatacgttggtcacgcggtcgcggatgtactgctgcttgacgccggcggcaccgaacagcgagcgcaggcggtcgcgcagcgcctcggagagcacggcaccgaacggcttgtagttcggggcggccttgttgacgatttgggcgagcttgtcgagcatcgcttcagcagcaccgtccacgctggcgactcccagctcggagctgatgtccatgagcagctggttgcggcgagaagagacaccgttggtcagggtgtcagtggtgtcgttgctgccgatctggtcgatgcgcaccttggcggagtaggccatgagcacgccgatggcatcggaagccttgaagggcaggtcggcgacggcggcaccggacggtgcgccggccgcggcctgccctgattgcaggccgcgcgaggagtcggacagtccagtggactgtccggcgacggagccatccgttgtctgagcagcctcagtcacggcatttgccggagcggcaccggaaccgagcttggcgacggcggaaccaccggcaggagcggtttcgaccggggccgaggccgcagcctcttccggctcatcgtcgggaaccagcgaatcggtgtcggtcatgtagacgcggccttcatcgcggccgacgttgtagacgaccgtatcgttgccggcgaactcgggtagacgcagggtcttggcaccgaggttggccagggtcggggcgttgccgaggccgacttcgacgtattcttccacgccgaggccgccctgttcgcgctgaccgaagagcagcgcctgggtttcaatccaacgcaccggggaggcgaactgccaggagagcagttcggtcaagagcagacggccgagcttctggtcgtcatcggcgtaggaatcccacacggccgggtcgtcgagcgcggccttgatacgctcggacggcacgacttcgaggatcttggcggcgaattccttggtcatctcgaacggggtggccaccaggttcgggatgtagcggtccaccagacggccacggtagtcgatgtaagcgggaagcagcgcgtcgagcttgtcgcggaattccggcacgcccttgcgcagcagtgtggagtggaacggcacatcgatgccgggcaccagcatgaacgcgggcttgccaccgaatgcggccacgcggcgggcggaatcggccttcagagccttgagtccggcgatcgtaccggcgatggcgtactgctggccggcgaggttgtagttcacgatctccaggaattcgccggacgccttggccacggattccacgtattccttgacgtgcgcgtcgtccacaccgaactggttcgggcgcagggcacccatgcggtagttggagcgaccctgtgcgtcacgctcgatgaggtggtgcatggtggaaccacggtggaacacgagctccagcacggtttccagcggaatcacgtcggcgaacgcggacagcgcgttgtattcgccgagcgagtggccggcgaagtaggcgggccagatgtcggcgccggcttcgcgcagacgagcggtctgggcgaaggccacggtggcgagcgccacctgcgtgaactgcgtcaggttgagcaggccttcggggtggcgataggtcacgccgttggcggtgagctccttcgggttatcgcgcacgaggcccaggatcgagaagccgagcttggagcgggtgagcttgtcggcgcgctcccacacgtcgcgggcggcggcggacttggcacgctcgtccagaaccatgccctgcttctggatgccctggccggggtagacgaaggcggcgcgcggcgcgcggaccagtgcggtgccgcgggagacgagctggccgtcgatacggcaggtgacttcgagggtcatgccgccgtggcgcaccttgccgacgcgctcgacggagatttcgacggtgtcgtcaagctgaaccatgccgtacatgttgtaggtccagccggcaatctcgtagtgggcacccttctcgtccagcgcctgcacggcgtgctgggcggtggcggacagccacatgccgtgcacaagcggagcggccaaaccggagatgcgagcgccacgagtggaggtgtggatcgggttgaagtcgccggaagtgcgggcgaaggcggtcatgtcgtgtggggcgacgaccttcacgcggcgcagcagacggcgcggcgtgggcgcgatctcctcgtgctcggcgtcgccgaactcgggggcgtctgccggcaaagcatcggagtagacgcggccgcggatcgcgaaacgctcggtttcgcgggcaagcagcgtgccgtcggcagcggtgtgggtcacgtggatggtgaccacgcggccggaggcggactcgaagtaatcctcagcccaagacttcagggtgatggtttcaccggtgtgcttaagcaggtcctcctcgttcacctcaagttcgatgaggtggtcgaggtggacggcgttgagcaggccttcaatcaccgggtagcccttgacgtacacggagccgagcgccgtgtaaatcgccggccaggccgggccgaccagcgcatcgggagcgatgcggctgggctgcagggtcgtcggcagagcggcgccggtggccgcttcgtggtcgaagccgaggttggcggagagggtgtaggcggcggtggcggtagcaaacggacgctcgtcagaggtcttgccgtcaagctgcggcatctcggtgagcttgtcgccggtgatggcggtgttgccgatgcctgcggtggcggcgagcatcgcgtagacgtccggaatcaggcgttcgcggtccacgaccggcacacggccgggctcggtgccttccacgatgagcgggatgacgatatcgcgcacggcgtgcttggaggtgccgccgtccgggtcgttgtcccagtaggtgtcgaggtggatgtccagatcgtacttgccggccgcggcgtcaaacgcgcggatctcgtagtactggtcgcccagggcggtgccgtaggcggggttgtcggtgatgtggccgacccaggagatgttcggggacttgcggatgaagtcctcggcgctggtggcctcgccgagtgcggcgaaatcgtcgttctcagcggcatcggcggcctgctgttcgtcctgcacgcgcttgatggcggcggtttcgaagcggccgaggatgtcggcgatcggctcgtcgatggtggtgatgccggccacggagatcgggccggggatggcacgcacggaatcggcggagtagcgctggtcttcggactgccagagctggtcctgaccccaccaacgcagcaggtcgttgtcgatgacgggcacgaacggcatgggcttggggtattcgcgcacgagcaccgggaaccaagccacgtcggccggaaccaccttaagttcggcggtctgcgggtaggccagtgcgagcttttcgagtgcgggggccggatcggcgagaatgtcgtcgtgggtcagcaggtcagcggcagctgcctcttcagcagaaacgccatcagcggcgaacagcttggaggtgaattcgccggagtccgtgtcgttcacacgggcttcgatgcgctgcagcaggtgctggaagcggtcggcgtaagtcgggtcggcccacgggaaggcgagttcggcgaagcgccgcgcccactcaaggtaggtcatggaggccaggtctccgaagtaaggcttggcggtcttgttcagggcttcgatgatttccttgcggcgggagtcgagctcttcggggtgcttcatgacgcgcacgagcagacggccgcattcggcggagtcgttctcgagctcgtaaatgtcggcgtgcaggtggctcaggccggaggacatgccgccgacggacttgccggacggcacccagtgggcggcctgcggggcgaacacgtcgtcggacttggcgtcggccggaatgccgggcgtcttgacgagcagctgcttgacttcggggctggtgtgagcctccttggcggtcatcgcggcggtgccgataagcacaccgtcgaccggcatgtcgggcaggccgtaagcgtgggcccactggccggaaatgtagtcggcagcgcgttcaggggtgccgatgccgccgccggcgaccagcacgaggttgtcgcaggcgcgcacttcggcgtaggtggcggcaagcaggtcatccagcgcttcccagctgtggtggccgccggcttcaccgccctcgacctgaaccatgatggtggtgggggccacggccttggcgatacgcacaacctggcgaatctggtcaacggtgccgggcttgaagctcacgtacggcaggccgtccgcctgcagcgactcgatcagggccacggcttcgtccagctcggggatgccggcggagacgaccacgccgtcgatcggcgcgccggaagcacgcttcttgggcacgatgcgggaggagccgaactgcaggttccacaggtaacggtccatgaacatcgcgttgaattcgaccgtgcggccttcctccagctcgtcttcgagggcggcgatgtggcggtcgaacacttcggcggtcacctggccgccgccggcgagctcggcccagtaaccggcgttggccgcggcggccacgatttccggttccacggtggtgggggtcatgccgggcagcagtaccggcggcttgccggtgagcttggagaacttggtgaccagcttggcgccggccggggtgttgatgacgcgcggggcgaatgccttccagttctgggtgcgctcaggctcgctttccagcgtggagagcgtggagcgttcggacagcgtggtggcttcgaccacgccgatgccggtgccctgcgccacgttgccgatcagcttgccgagcgtgttgccggggccgaggtccacaatccacagcttggccgggtcggcggcgttgaacagcgccttgacgcgggcattccagtccacatggttgagcagcacttccgcagcgagtgcgcgggtgcgatcctggtcaaagccgcaggcgccagcccaagacacggtctgctcaacagcttcggccatgagcggcgagtggaagggcagggtgacctcaaggtattcgagggtcgggttgaacacggtgccgccgtggagcttctgctcgcgcagcttggcctgatgctggtgttcgcgctcggcttcgagggcgaaagcggccaggtcttccgggtagccggacagcacgtggtggttgtcggagttggtgacggcgatggagatcgggccgcgagcgttgttgacgcgggccaccagcgcctcgacctgggcgcgggtggcgcccttgacggagagcatcgggctggcttcgccgtacttggggttcaggcccagttcgcgcacgcggcgggttccggcggcgccgatcagggcggccacggccagaatctcgtcaagcgtggtgccggcggcctcgatggagccggcggcctcgatggcgcgggtcatgtgcacggcgagcacgccctgggagtggccgagcacggcgagcggcttggcctgggccacgctgtagccgaggtgttcgaggtcgagcagggcgccgagctgggtcagcgccacgccttccacggacgcggtggcgtcggctgcggcgccgaggcgtgccgggttcggggcgaagccgaacaggtcgaccggacggccggtggtggccagcaggtcggcggcgaccggggtgagcagtcggccggctgcggcgacgtggccgcgcagggcctcgtcaaggctgggatcggtggtctggtctgccagggctaccggccacggggtggactggccggcgaaggcgagcgcatggggctcggtggctaggcgattgaggaagaaggtggtcattgctttccttacttgtgtttggttgacgtcttcaaaaatcagaggggctggttgccgtggtgtttggtggtgcgcttgacgcgccgcttggtggcgagcgtggccagcgattcgacaatcacctcacgggtctgttcggggtcgatcatgccgtcgatctgcccgatttccagtgacaggttcgcgttgacggtgctggtctcgtactccttgatgtacttggcccgcagcgcatcgacgtcctgtccggaggccttggccttggccaggtcgtggcggtggatgatgttcaccgcgccggccgcgccgagcaccgcgatctgggaggagggccacgcgaagttcaggtccgcgccgatggccttggatcccatcacgatgtacgcgccgccgaacgccttgcgcaacaccacggtcaccatcggtacctgtgcgttggcgtaggcgtagatcaccttggcgccgcggcggatgatgccggcgtgttcctggtcggagccgggcttgtagccgggcacatccacgagggtgaccacgggcaggttgaacgcgtcgcacaggcgtacgaatcgggcgactttctcggacgagtcgacgtccaggatgccggcgagcacgttcggctggttcgccacgatgccaaccggcttgccgtcgatgcaggcgaagccgacgagcgcggaggcgccgaacagttcctgcacctgcacgaattcgccgtaatcgacgatgcaacgaatcacttcgagcatgtcgtagggctgacgttcgttggtgggcacgatggtggcaagtcgcttggcggtctcgcgttcggcgcgggtgacggcgtaggcgtagaccggcggcttgctttcgctgttggacggcaggtaggcgagcacggtgcgcgcatagtcgatggcgtcggattcgtcctcgccgaggtagtgggccacgccggacacccggttgtgcacttcgccgccgccgaggtcggccatggagatggtctcgccggtcgaggccttgaccacgtccggtccggtgacgaacatgttcgagttctcacgggtcatgatgatgaggtccgtcagggccgggcagtagacggcaccgccggcgcaggggccgagaatcaggctcagttggggcacgaagccgctggcctcgcaagtcttgcggaagatgcgaccgtactgggtcagggcggccacgccctcctggatgcgggcgccgccggagtccacgatggccacgatcggcactttgaggtcgatggccatgtccatcagtcggcagatcttctcgccttcggcggtgccgagggtgccgcccttgacggagaagtcctgggcgtagacggccactttgcggccgtagacctggccgaagccggtgatgacggccgcaccggcgttgccgccggcgatattgccgccctggaagcggccgatctcctcgaacgtgccggtgtcgaagagcaggtcgaggcgttcgcgcgcggttttcttgcctttggcgtgctgcttgtcgcgggcgcgctcttcggcggcgcgggccagttcggcggccttggccacagcggtgcgcagcggctggtgggccgagggctgggcggcgttggcggccgaggccgcagccgcggccttcacggccggcgaatccatgatgtcagtcattgccaccctccttcttggcgtcggcggccttatcggctccttctgacgagggagctgtcgacgcagccgaatgagggagagatcccggcgcagccgcagcagccttggccttgccggcgttcacgtccagcgtgaccagcgtgtcgccggcctccacgccatcggccgggccaacgaaaatcttcttcacttcgccggcggccggcgcgtacacgtagttctccatcttcatggattcgagcaccaccagaaggtcgcccttggccacttgctggccttcggacacgttgatgcgcgtgaccacggcctgcatcggggaggcgatgacgccggatttggcgccgtcgttggccgcagcggcaccggaggccacgttgtgcagtcccgcaccgcgcaacggctgggtggggcgcttggcaccgcgggcgcgggccgagccggtgatgttctccacgatgtcgagtggcacggtgagcttgacgcggcggttgttcatctcgatgacgaacgtctccgacttggacttgtcgggcgcggccggggcagcggcacccggggcggcggccaaggaggccggctggccggaggcggcggaagccggtgtgcggttcaggtacgtgcgctccagccacttggtggacacggcgaacggatggccatgctcggcggtgaagtcgtcgttgcggaagatttccttgaacagcggaatcggcgtgggcacgccttcgatcacaagctcatcgagcacgcggcgcacacgggccacggcgtcgagacggttctgggcggtgacgatgaccttgcccatcatcgaatcgaacttcggggagatggtgtcgccctgttccacaccggtatcgatgcgcacgccggggccggccggccactggatcttctccaaggtgccggagccgggggtcaggttggtggccgggtcttcgctggtgatgcgcagttcgaagctgtggccgcgcagttcgggggcgcgggtgagctcgccaccggcggcgatattgagctgttcgcgcaccaggtcgaggccgctgacctcttcggagacggtgtgctccacctgcaagcgcgggttgacttccaggaagtacaccttgccgttcggggtcaccatgaattcgcaggtgcccaggcccacgtagccgaccgtggtgaacaggcggcgggagtattcctcgagcgtgctgatgatttcctcggacaggaagggcgcgggtgcctcttccacgagtttctggttgcggcgctgcagcgagcagtcacgggtggagtacacggtgaagttgccgtgcgagtcgcgcccggactgggtctcgacgtggcgtgccttgtccacgaacttctcgatgaagtattccttcagatcgccgccttgcagcgcgtcgtggttcatgtagaagcggcgcagctcctcgtcgtcatgcaccacggtgatgccgtggccgccaccgccatcagtgcgcttcatcatgatcgggtagccgtgggtgtgtgcgaagtcgagcagcgtgcgcacgtcggtcaccggttcggacaggccgggcactggcggcactttggcgcgtagggccacgcggcgggcggtaatcttgtcgcccaaatccaccagcgcggtgtggtgcgggcccacccagatggcaccggcatcctcgaccttctgcgcgaagctcggcacttcggaaaggaatccgtagccggggtgcacggcatccgcaccggtcttgtgcaggatgtcaatcagcagatcttcgttgaggtacgtgtccttgtaggtgtcgccggagagcaggtatgcctcgtcggccatgtccacatagcggctattgcgatcctgttcggagtagacggccacggtggagatacccatctccttggccgtgcgcaccacgcgaagcgcaatctcgcctcggttcgcaatcagcagttttttgacgatagaagccatagtgtcaaattgtgctctctatatagaggagagggcaagccgcgttcacacaaaagctttcacgcccttttgtaggctacgaacaaacgcgcgcgtaggttccggcaacgtaaccgttggcgcctgctatcaaaaacgttgcaaatccgccgattgcacatccttgcgcgccggctcaagaagttgacgttacggttgtgttcgtcaacttatgacaaatcgaaatcgacaattttgtaaattggtacgaaaccgcacgaaatcgaacacctctacgatggcaaccgtaagttcgggggaaggctcatctgcgggcgaacggaaggtgaccggaccggcatcggtccatcgccgcacgattcgcccgcacagggtcggattcatttgggaccgtccaccatatggacggttcggactgtcggggataccgcacgacccgccggaacctcccctcatccatcgcataccgcccgccgttcacggcgatatcacgcaacataggggtcattgatatgcagacttcacacaccaccgcatccgctgcggccaccacatcgctcgcccgtcgtatcgtcgccgcatcctggaagccggtgctgttcgccgtgctgatgtggctgtccgcggccgccggcgagattccgattccgggcacgccggtgccgatcacgctgcaaacgttcgtggtgatgctcgccggtcttatgctgccgtggcgtcaggccggtgccgccgtcgccacctatctggcggccggtgcggtcggcctgccggtgtttgccggcggcacctccacgctggccctggtcggcccgagcgccggcttcctcttcggcttcctgccgggtgtggtggtcatcgccctgctgcgcggcaagtccgacacttcgtccttcgcggccgccgcgcgcaccgcgggccgctacctgctggccgcgctggtcggcggcgtcgtggtggtgtacgccttcggcttcgtcatccagtccgcgctgaccggtgcgccgctcgccgccgtggccctggtctccatgggcttcgtggttggcgacgccatcaaggccgtggtggcctctctggccgccgccggcctgtccaagctcggtcgctgacctgagctactagctagctactggccggctattacagcactcccacatcggcggtgcggaccgtatggtccgtgccgtcttgtgttctcaggatcagtgaggcgtcttcgttgaggccgatggcttcgccggtcagcgtggtgccgtccgtgaagtgcgcctcgacctgacggccgcgcgcccagcacaccgccttcacctcctcgcgcaacgactcggcctggcccttcgggtcggcgatgaacttcaccaaccgctcgcggaagccctcgacctgacgttcggccaccgcatcgcgcatctcgccgaacgacggcagcccggagacatgcagctgcagcgaggtcgattgcggcgtgggcagccgacaggcgcccaaggccaggttcaggccgacgccgaacacgatgacgacgtcgtcatcggcatcagcatcagtaccggtaccggacgacggcggaatcaccagttccgagagcagcccgcccagcttgagcccgtggcagaacacgtcgttcggccatttgagttccagcgagcagtccggctggttcggcgcggcaccgtattcctcgatcatgccgttcagggcgtccagcgtgaccagtccggcgatcatctgcagccagccattgacggattcgtcggtggcgatcgcgcgcggaatgcgcacggcataggacatcgtcgagcaacggccgggctgactgacccacttgtgaccattgcgcccacggccggcggtctgccggtcggcggccaccacggccaccgccagttcgccatcctggtggtcgggcaacgtcaacgacccgtcgccaatcatctgtacggccagcgcgttggtcgaatcggtttcgtccacggcgaccacatgatctgcgacggctgtagttctgggtagctgcggcgttgcagctttcaacgcaatcatcatgggcactacgttacctcgattttggcgcgatatgcccgcgttattccatggaaaagcgcgcaaaatcaactattttcacccacatagcccatgttaacgttcacaacttcggaaattccgcattcgccgaccccacgcatgcacccggccgtcatattggcttgcgaacaatggcgatgcccggcagacatcgaatatcaaccgttgacctgtgcggctaccatatattgtcatgacgtcaccagccaccgcgaagcttgccgccgtatccagccgccagtcccacccgcatcttgcgcgcgcgggcgctgccgcgcgctggacactggccgtgctggccggcctgtggcttgcactgtgcacggcggtcggcccgctgtactgggacgaggagaacggcaccctcgcccattggaactgggccaataccgcaatattcgtcgtgtcattcctgatatatctcggaatcatcacgctgatggtgcgattcgcagcaggccagcgcatactgccgagggctatcggcgagcgactacgtcaacatcagcggaatagcgaaacatcacggcccgccgccgatcagcaggccagccaaccagccaagacccgtcgtaccgttcgcgctatcgtcacgtccaccgtcactgttctggaccgctggatcacacgcggcacgaaccggttctggaagcttatgctggtgttttttgtcggctggctctgggtgccgaccactctgctggccgcattcggtgcggacctccgctcacagatccgtgaattcagctgggcctggaaccagtggaccggcctgaaacagccctatatcggcttcttctccttcgtgccgatggacatctaccccactgcgcactacatgtggccgtccgatcccacgtatctgaccgaccagcacaatgtggtactcactgtgttctatggcgcgatggtcacgtttgcgaggcatctgaccggctcaaacgatgccggtatcgtgacgttggctgccctgcagacgctgttcgccgtgttctgctgcgctgccgccgccaatcgattcctgaaccggccttggataggaaaaacggcaacggattccgccgctcccccacaggccggaggattggctcgattcctgattctgctgttctttatggtctgcccgctggccgtgttttccactatctccatcaccaaatcgccgctgttcgcgttctcgttcgtctggtggttcagcgtctggtatgaactcgtccagacctggcaccccgccggcacccgcaaacatcctcagacccctgccatcgccacgcccgtccacttgccgcgtcacagtttcatcgcctttatcctggccacgtcggtaatgctgatttccgcgaaatatgcgtggtacatcatcgccctacaaatcgtgctggctctgatcgccgaccgcaagcgctgggcgacttacgtcgtggcgctgctcatccccaccgtactgattcacggcggcatctccttcgccatctcctctggcgcgatcatcggcggcgacccaatcgaaagccgcggcgtacagctgcaaatgatcgcccgcgtggcccagcgcaatccggacggcatttcagacgaagccaaaaagaacctcgcgcccgtcttcaatctcgatcagatggccgacgcttactcccagcaggacgccgacccggtgaaatcctccggcattcaggccaagaaggtcagctacaagtggcgcacggtgacgcccgaggatatgaccaatttcaacaaggcatggttcgaaatcgtcaaggacaatccgatcatcgcgctggatgcgttgctggccaaatgcttcggatacttcaatgtgaacgatcagccgtacgtatcgatggattattacgtgaccagcgattacgtgcagaaaaactccacatggatcaaggattacaaccatgactggcgtgagcacatcgccggcttcactcgcgtatggggcggtattcccgtactcggctggcctacgcacggcaatttctacgtggtgatgacattgctgatcggcgcggccgaggtgattcgccgacgttggctcaccctcatgacccatattccgctgctactgctgatgggcgtgatgatcaccgcgccggccaataatttcgagcggcacatgttgccggttgcgtttgtattcggattcgtggtgctgacgtattggcgagagtctttggctgaaaggcaacgccaatcagcgacgctacactagtgactatgtcagattttctcgaacttcttgctgccgacgttgccgattcgtccgcacccggcatcaccgcgaccaaccgcgtacgcaccgtgctgttcgagtgcctgttcaatcatctggccgacgaacgagtggagtccctgttcaccatcctcggtttcgagcatgacttcgattgttacgccatcgccggataccctgcccggtccgccgcacgtacggccaaggaaatcgagaaaatcgtggccgatttcggcggtgtgtgtctgaccgccaagcgcccgatcggcaacagcaccgccgtagtggcgttgattcgtccggtcggtgcggccacgccggaaatcatctgcaataccatcgccccgtcgttcgccgccgatcggccaatcgccttgggtccgcagcgtaccggtgccgatggcgcgatgcgttcgattcaggccacgctttactgtcttcaggccgcgccggctctggccgccaccgtgcagccattgccgcgcccgttacgcaccgacgacgccctgcccgaacgtgcgttgatcggcgacgcggacgcccgtgacgaactggtccgcgtggtctacggaagcctgacagcagcaggccctgatgatccgacgctgctcaccgtctccacattcctgaagttcggcggttcgctcgagaccacggccaaggagctcaacgtacatcccaatacgatccgctaccgtttgaagcgtgccgccgaatccaccggctgggatgccaccgacccgcgcgaggcgtacgtgctgatcaccgccatcgcgttgggtcgtgtggccgaagcgtaacggaccgcaacgtagtcgggcagaagcataaccagcagaaccgtagccggcaaaggccatagctgaccggacataaccgtccagcccgacagcctagcgggccgaatcaggctgcctgaatctcgtgtacgccatcgtgcagtaacgcggccaagaattcttgagtggctaacacttcgtccacgaatccaccggcggacaggctggcgatcacgcgaccggactcgttgtccacaatcggtacaccaacggcaccgacacccaacgtcacatcctcatccgacagtgcatatccacgttcgcgagtcaagcgaatatcctcgcgcaactgttccacactgaccagcgtgttctcgttatatgccgggaacggcgctcctgcaagatagcgttcgacatcggcatcctcgaaatacgccaaggccacgcggccggccgcgccagcatgtagaggcagcacgcggcccgggcgcaggatcagcgaatcgatggcatgaccttgcgcgcattccacgcataccaattcagtgccggagaccacactgaggaatgaggtcatgccggtttgcgcggtgatggcatgcatgaccgcaatcgcaggctgccattcggtacgagacgtgcgagcggcatcagccaatcgcagccagtccagcgataatgagtagttgccatccgtatccgttacggcccaccccacatcgaccagtccatccagcacacggtatacggaggatcgcgggatatcacaggcgtcggcgatatctgccggagacagaccattctccgccgccaatgcgtccatcacacgactcgccttgtctaaagcgcgggtcggttcacgtttgtcttccgccatcgccgacgttccttccccctgacttatccctgactcatcgtattcaactgctcaggccaagataatcaccgctgtatccaaggcctcgcgacacctcgcggccggcagtctgcaccaattgcaccatgtcttgagccgatgccgttgccggtttcccatctaccagacaggccagctcaggttccaaggagcgggaaaggccactcagggcgattgccgcctgaatctctccggcgtgattgaataccggtacgctgatagtcacggagccggccatggtctggccgacatcataggtgaagccgcattcacgtatatgacgagcctgtcccattgctgtggtacgcatcgtggagaatgtgccgccgagctcgttgttataggcatagtgttccaacagctgctcgtagcgagccgggggaagccaggccgtcagtacatgagagggagcgctcatgctcagaggcaagctattgcccaccagctgtgcatagctttgcaatgcctcacgggtgcgtgtctcgatacacaccgtgcgcaatcgcctccgaacgaacagaccccagatgccgaactggccacgatgggcgcggaaggtacggcgagcgatctgctgaatgtccagtctgctttcgatttggccgccgatacgtacgcaatcgatgccaagccgatactcgccacgattgatgccgcgttccacccaaccgactgcggcgagattatccagcaaacgatacgttgagcttacgggttcaccagtacgttcgcttatggtttttgcagtgcttggtcccagttccgccaatacatcaagtactgccttggatttcaccaatgcatctacgctacggtcatcacggcttggcgccaccatgcgcgtcacctcctggcctgtatgttgatacctcagccatcttaccgggtattcagcgggttgccgcccaaaacgcactgggccccggcaggagtatcccgtcggggcccaagaggtttctggctcccctctttgagggggagccgtccgcgcggcggaccgggggagatccgagacgctaaggcccaaggacgcgagaaacaccccgacgcgcgggtgtcctgatatggggaaagccccttggggcgtgtgctccgaggggcttcctgtacgtgtggtgcggcggcgtgctactctcccacaccctgtcgggtgcagtaccatcgccgtgccaggccttagcttccgggttcggaatgggaccgggcgtctcacctgggccatggccgccgcaaatcttctcttgtacggtcagacgctggggtctgccggcctgtggcggcctgggaaccggacagcggacgcggatatgtcgatgtttcgtcttgtggccagacaatgctcattgccgtctggtgccgtttgcaggaggaagatgcggtccaaccgccaggggttggaatgttggtgttgcctttcgtccgttagtaccggtcggctccacccctcgcggggcttccacgtccggcctatcgaccacgtgttctgcatggggactacaggaactcgaaggttccacggaatgcttatcttggagcaggcttcccgcttagatgctttcagcggttatcccttccgaacgtagccaaccggccgtgccactggcgtgacaaccggcataccagaggttcgtccacccaggtcctctcgtactatgggcaggcctcctcagcattccaacgagcgcagaggatagagaccaaactgtctcacgacgttctgaacccagctcgcgtgccgctttaatcggcgaacagccgaacccttgggacctgctccagccccaggatgcgacgagccgacatcgaggtgccaaaccatcccgtcgatatggactcttgggaatgatcagcctgttatccccggggtaccttttatccgttgagcgatgccgcgtccgtacaccggcaccggatcactagtcccgactttcgtccctgctcggaccgtcgtcctcgcagtcaagcccgcttgtgcacttgcactcgccacccgattgccaaccgggctgagcggacctttgggcgcctccgttactctttgggaggcaaccgccccagttaaactacccgccaggcactgtccctgaacaggatgactgttcgaggttagacatccaatgcgaacagagcggtatttcaccttacggctccgcgcgatctggcgaccgcgcctctcggcctcccgcctatgctacacaatccacaccgaatgccaataccaaggtatagtaaaggtcccggggtcttttcgtccttctgcgcttaacgagcatctttactcgtactgcaatttcgccgagctcctggtcgagacagtggggaagtcgttacgccattcgtgcaggtcggaacttacccgacaaggaatttcgctaccttaggatggttatagttaccaccgccgtttaccggggcttgaattcaccgcttcacccgaaggctgacggatcctcttaaccttccggcaccgggcaggcgtcagtgcatatacagcggcttgcgccttcgcatgcacctgtgtttttggtaaacagtcgctaccccctggtctgtgccacccccaaaagctcccacagcaagtgtgttcaccatcgggggtctcccttaaaccgaaggaacgggagtgatttgccgagttccttgaccaggattcgctcgatcgctttggtattctctacctgaccaccagtgtcggtttggggtacgggcggcttcgagcctgacgccgaagcttttctcggcagccgggatcaccggatatcgggccataaggcccccatcatcgcacctcggacccatgcgggacggatttgcctgtcccacgccctgcgtgcttgaccacggaagaccacctccgcggccggctacccttctgcgtcactcctgcgctgacctactacaaggatcggtcccaacaggccagggcatcccgcccccgaaggagcagtaagcccggacccggaggttagtactccaagcctcggttttggcggctgaaagccggtacgggaatatcgacccgttcatccattcgactacgcctgtcggcctcgccttaggacccgactcacccagggacgatgaacgtggccctggaacccttggtcatccagcggacgggatcttcacccgtctctcgctactcatgtctgcattctcactcccatgaagtccacggcgcgttcacacggccgcttcgcccctcatgggacgctctcctacccagtacaaaatactgccgcgtcttcggtggtgtgcttgagccccgctacattgtcggcgcggaaccactagaccagtgagctgttacgcactctttcaagggtggctgcttctgagccaacctcctggctgtctatgcgactccacatcctttcccacttagcacacgcttcgggaccttagacgacggtctgggctgtttccctttcgacgacgaagcttatcccccgccgactcactgccgggatacgcgtcaccggtattcggagtttggttgctgttggtacccgatacgggcccgcaagcatccagtagctctacccccgggacgtaatgacccgacgctgcacccaaatgcatttcggagagaaccagctatcacggaatttgattggcctttcacccctagccccaagtcatccccccggttttcaacccaggtgggttcggtcctccacgcggtcttacccgcgcttcaacctgctcagggctagatcatcccgcttcgggtccaggacacgcgactcaaacgccttttaagactcgccttcgctacgcataccccacacgggttatgctcgccacatgccactgactcgcagactcatttttcgataggcacgccgtcaccccacaaaagggctccgacggattgtaggcgcacggtttcagagactgtttcactcccctcccggggtacttttcacctttccctcacggtactcgttcgctatcggtcagacaggaatattcaggcttacccaacggtctgggcggattcgcacggggttccacgggacccgtgctacttgggagacgcgatcggcagaccatgcgcgttcaggtacggggccctcaccctctgcggcccggtattcaacccggttcccctgacacatggttttctgcaactgccggccggcccgtcggagccggcgcacgcgatcccgcaacaccccgcgcgcaacccccgacgggtatcacacgcgcaaggtttggccatcatccgctttcgctcgccactactcacggaatatcctttcctgcaggtactgagatgtttcacttccctgcgtaccccccggccgaagccggtaccgacccatgacggtcggtgggttcccccattcggaaatcctcggatcaaagccctgttggcggctccccgaggcatatcgcagcctcaaacgtccttcatcggtcctgtctgccaaggcatccaccatacgcccttgcaagcaacacacaccacgaaagtgcatggccgcaagattcctctagcaaattcccagacgacaaatcatcacactaaaaatgatcacaaaacgatcgaaacgaacaatagagttcgattcgaaatcaacagcaaaacaaagattcaaaaacccttgttttgctcgcgtccactatccagttctcaagccaccaagcaccgccacgccatcgcgccggcacacggccggcccccaggcacgacgggcatcgaatcgcgccaggcaaaaagcctggggtggcgatccgggagcccaaaagcgcatccataccaccccggcacccaccgcacgaccggcagggcaaagccaacgacgtcttccacaccagcaaccccgccgccatcgcaccatgcgacgcgcggggcgcacaccgtcggacgaacatccgactgaattctccgtagaaaggaggtgatccagccgcaccttccggtacggctaccttgttacgacttagtcccaatcacgagcctcaccttagacggctccatcccacaaggggttaggccaccggcttcgggtgctgcccactttcatgacttgacgggcggtgtgtacaaggcccgggaacgcattcaccgcgacgttgctgattcgcgattactagcgactccgccttcacgcagtcgagttgcagactgcgatccgaactgagaccggttttcagggatccgctccgcgtcgccgcgtcgcatcccgttgtaccggccattgtagcatgcgtgaagccctggacgtaaggggcatgatgatctgacgtcatccccaccttcctccgagttaaccccggcggtcccccgtgagttcccggcataatccgctggcaacacggggcgagggttgcgctcgttgcgggacttaacccaacatctcacgacacgagctgacgacgaccatgcaccacctgtgaacccgccccgaagggaagccgcatctctacgaccgtcgggaacatgtcaagcccaggtaaggttcttcgcgttgcatcgaattaatccgcatgctccgccgcttgtgcgggcccccgtcaatttctttgagttttagccttgcggccgtactccccaggcgggatgcttaacgcgttagctccgacacggaacccgtggaacgggccccacatccagcatccaccgtttacggcgtggactaccagggtatctaatcctgttcgctccccacgctttcgctcctcagcgtcagtaacggcccagagacctgccttcgccattggtgttcttcccgatatctacacattccaccgttacaccgggaattccagtctcccctaccgcactcaagcccgcccgtacccggcgcggatccaccgttaagcgatggactttcacaccggacgcgacgaaccgcctacgagccctttacgcccaataattccggataacgcttgcaccctacgtattaccgcggctgctggcacgtagttagccggtgcttattcaacgggtaaactcactctcgcttgctccccgataaaagaggtttacaacccgaaggcctccatccctcacgcggcgtcgctgcatcaggcttgcgcccattgtgcaatattccccactgctgcctcccgtaggagtctgggccgtatctcagtcccaatgtggccggtcgccctctcaggccggctacccgtcgaagccacggtgggccgttaccccgccgtcaagctgataggacgcgaccccatcccataccgcgaaagctttcccagaagaccatgcgatcaactggagcatccggcattaccacccgtttccaggagctattccggtgtatggggcaggtcggtcacgcattactcacccgttcgccactctcaccaccaagcaaagcctgatggatcccgttcgacttgcatgtgttaagcacgccgccagcgttcatcctgagccagaatcgaaccctccacaaaaaaacctcatgaaaagcatccgaatagatgactctcaaaacaaaaattgacgagcacgtccttaaggaaggacgccctcaaaaaacctcacccctcatcaaaccctcccgggtacccaaccaccacgacaggcaatcaggcgaggaatgaactggcaatcattgactataaagaagtagtacaaacacgctcttgagttctcaaaccaccaccacaccagccagacgggaaaccaaccagaggaaggaacccgccgcgctgagcggcaacaggtgaataacttacacgcatgtccggattcacgcaaatcgggcgcacgaagataagcctaaatcgttgaaacgacaggcttcgctcggcgtgtcgcaaacagcctatttgcgctgttctgatatcagaataatccgttttgcattgccgatgcgtaacaaattcatgtgttcatcggcgtgttgcaagaattcgattgcgtgaccatccaggttcaccttctcgcaaccggtcatcgcatatgcaaaaagggacttccctttacgggaagtccctttcagtagctattgaagctcgctagcttcaggccagggtgttcgggtcaaccggaacgcccgggttcatcgtggaggtgatggttgccttggtcaggtaacggcccttcacggtggacggcttcagacgcttgacttcgtcggccacagccttgaagttctcgtccagagcggactcatcgaagctcatcttgccgatgaggaagctcaggttgccgttcttgtcgacacggaactcgatcttgccgcccttgatgtccttgacagccttggtgacatccatggtcacggtgccggtcttggggttcggcatcaggccacgcggaccgagcacacggcccagacggccgaccttgcccatcatgtccggagtagcaaccacggcgtcgaagtcgaggaagccgccctgaacctttgcaatcaggtcgtcatcaccgacgatgtcggcgccagcctcggtagcctcggtagccttcgggccacgggcgaacacgaggaccttggcggtcttaccagtgccgtgaggcaggttgacggtaccacgcacgagctggtcggccttacgcgggtcaacgctcagacggaacacagcctcgacggtctggtcgaagttgtaggagggcatgctcttgagcagagcgatggcctcgttggcggtgtagaggttgttgcgatcgacgcgctcagcggcttcgcggtacttcttggaacgctttaccatctgtccttctccttatcagtccgtaaccgtgatgcccatcgagcgagcggtgccctcgatgatcttcatgccggcctcgatatcgcgagcagacagatcttccatcttgatctcggcgatttcgcgaacctgcgccttggtgacagagccgaccttgtgggtcagcgggttctcggtgcccttctcaacgccagcggccttcttcagcagagctgcagccggcggggtcttgagcacgaaggtgaaggaacgatcttcgtaaacggtgatctcgacagggatgacctgacccatcttgtcctgcgtctgggcattgtatgccttgcagaagtccatgatgttcacgctatgcgaacccagagccgggcccagcggcggggccgggttggccttgccagcctggatctggagcttgatcagcgccgagactttcttcttgggagccatattatggttcttctttctataacgcggttcgaatggtcgccgtcctcaggttcggctgtctgccatcatgctcggtcttgactcattatttatccgtgcatgctgtaggcaatcggcctgtggtcggtctcctcccgcaacttatattgctgtgctgtgctagcgagtctcctctccagacacaagctttcctattatgcaaatccacccggacaacacaaaaagcccgaccacgatggtcgggctctgcaaagtttgggagttaatctagcttctgaacctggtggaagccaagctccaccggcgtatcacggccgaagatggacacgagcacggtgagcttctgagtggtgggctccacgtcggaaacaacggcggccatggtggcgaaaggcccatcggtgacggtgacctgatcgccaacggcgtaggagacctcgaccttgcgcttcttggcggcggcgggcttgtcgccggcggccttgagtgcctcggaagcaatcatcggagccatcatcgccacgacttccttgcgggagagcggcgccggatccttggtcgggccaacgaagccggtcacgccttcggtctcccgaacgatacggcgggcgttctcatccggccacatacgaatcaacacgtagccaggaacacgcacgcgggtgatgaccttcttgcccttctcggtgtgcttctcgacttcttccatcggcacctcgacctggaagatctggtcttccatgccgaaggaggcgacgcgggactcgatgttggtcttcacgcgcttctcgtagccggagtaggtgtgcagcacgtaccacttgccatcaagggaacgcagggacttggagaattcgtcaacggcctgctgaccggcatcggtctcctcggcctgctcggattcgttgacttcttcctcgtcctcatccagagaaacggtctcggtctgagtggaagcaacgggagcggattcagtcgccgccggagcgtcggactcaacatctgcattgtcgacggatgcgtcagattctgcggaaaggtcagcgaccggttcgaccggggcagctgcctcatcggcagcagcttcggaagcctcgacaacaggctcctcagccgggacggcgttgaggttctcgagattcagttcatcactcatgcgttgttattcaccttaggttgtgcggatcagccgaacacccacagcgtggccttgcctagaccgaagtccatgccagtcacgagggccatcagcagcagcacgaagatgaatacggccagagaccagaagaacagttccttggcggtaggggtcacgaccttgcgaagctcgtcgatgatctgcttgatgaacagaccgatacgcatgaagacattcggcttgactgccttttcactcttgctcgtcttagccattccgtacctcgcgtcagctgcttgattattagaaacttggcagggaaggcgggactcgaacccacaacctacggttttggagaccgttgcgctaccaattgcgccacttccctaggtgaaaatccacctcggcgtgcgttccgtagagaacgcttcgccacggcgaaaccgccaagtcgttatagtaacggctccggtggattatcgcaaatcgcgtgtcgcgcgcgtggcacgcgactcttctcagttagcccattccttgaatcgacgcatgccttcggctaggtcttcgtcggccagtgcgtaggagaaacgcaggtaaccgggagcaccaaaggcctcgccggggacggcggccacgtgggcctcatccaacagtgcagcggcaaagtcagcggacgtatcggacactgtgcccttgggacccagcggcttgccaagcaaagcggtgatgtccgcaaaaacgtagaacgcgccggtcggagtcgggcagttgacgccctcgatatcgttcaaggcggtcacaatcgcacggcggcgcgcgtcgaaggccttacgcatctcgtgcacctcatccagcgggccggccacagcagccaaagcagcacgctgggagatgttggccacattggaggtcatatgaccctgcagcttggcggcggccttggccacctcaagcggagcgaccatccagccgacacgccagcccggcatcgcataggtcttggccacgccgttcagcaccagcaactgcccgcggcattccggcacggcggcaccgatgtaggtggtgtgcgcatcgtcatagttcaggtgctcgtagatctcgtcggagataacccaaatgtggtgctcgacggcccaacgaccgatcgcttccacggtttccggcttccagacggctccggtcgggttgttcggggagttgacgatgattgccttcgtatgctcggtacgggccgcttccagcgcctcaagcgagggctcgaagttcacgtcggcaccggcgaatacttcgaccggcacaccaccggcaagcttcacagcctcggggtagctggtccagtacggagcgggaatgatgacctcatcgccatcgttgagcaagatctggaaggattcatacacggcctgcttgccgccgttggtcaccacgacctgatcggcattgacctcatagccggaatcgcgcagcatcttagccgcaatcgcttcgcgcagctcgggcaggcccggcgtaggcgtgtacttgtaattcttcgggtcaaggcaggcatctgccgcagccttgaccacgtttgcgggggtcgggaaattcggttcacctgcgccgaagccgacaacgtcaagtccggcggccttcatggccttggccttggaatcgacggcgagcgtagcgctcggtgccacagtgttgatacggtcggaaagagtctgccattgcgccatagtcatggctcccatgctaaacctacagcacgaaaaatcgccagagccgcactatggtgatggaatctgtcgtgtgacagattccatcagtcacacgagcacgagattgtcgcgatgaaccagtgggtgggcgtactgggggccgaggaaacgcttgagttgggcggtgttacgcccgagcatctgcggaatttcttcggaatcgaagccggcgaggcctcgggccaggtgttcaccgctttcggcatcgatccagaccggatcgccggcggaaaaatcgccatgtacttcgagcgcgccggccgccagcagcgaggcacgcccgccgcgaatcgcctggccggcacccgcatcgaccacaatcgtgccgcgcgggtcggcggcgaagccgatccacagacggcgtgaggagccgcgggccttaaccggtgcgaacacggtgcccaccggatcgcccatcatcgcagggcccgcgttcgaggcgcaggtgagtaccgtggggatgcccgagacggccgccacgcgcgcggcctcgagtttggtgaccatgccgccggtgccgaccttggagccggagccggagacttggatgtcgcccagcgcatcaatcacgttgggcacatattccacacggcgggagccgggctgcgagggcggcgcagtgtacagcgcgtccacgtcggtcagtagcaccaaggcttcggcccgcaccaggttggccaccaacgcggagagtcgatcgttgtcgccgaagcgaatctcgttcgaggccaacgaatcgttttcgttgatgatcggcaccacgccgaggtcaagcagacggtccagcgtgcgttccacattgcggtactgggtggcacgaatcgtatcttcggcagtgatcagaatctggccgacgcgaataccgaatcgaccgaacgcagtctcgtagcgggccatcagcagcccttggccgacggctgcggtggcctgctgagtggccacgtccaccggccgcgagtcaaagcccagaggcccgaaaccggcggcgatagcaccggacgagaccagcaccacacgtccgcccatcaatcggacctgagccaaggccgcggccaacgcgtcgagcttgtccgggtcgaggtgaccgctcggctgggtcagcgagctggagccgactttcacgacaatggttccggctgcggcgatcatgcgccgcacctcggcctgactcggagtgctcatttattcctcggtttcaccatcttcgctggactcaccgtggccgaacaggctggtttcgtcatggcgatcgtcgtcaacggtcgggtcggcccagtggccggccttgcgttcggccatcatcgcgtcgcgcacggcggcacgggcgtccatcatctcgtggtattgggcacgacgttcggcgttggagcggcggtgcgtgcgcgggtccagctcttcgagacgcagatccttgcctcgggcaccgaggttggagccgtcgagcatttcggcaccagcggagatggtcggatcccaatcgaattcgaccatacgggcaccacgaccgatgcgcacttcgtcgccggggtgagcacccttgcggcgcagctcgtcctccacgcccagcttggccaagcggtcagccaggtagcccacggcctcgtcgttgtcgaagttggtctgcatgacccagcgttccggcttgacgccacgcacctcgaagaacacttcgccattgccgagttcgcggcgctcgaccgtgaactcaagcgcactgccaccctcgtcagcacgacgcggacggcggcccttggtctccaatggcttgatgaccacgcgagcctcctcttcggcctgctcgcggttggacacttcctcacgcatctcgtgcaccagcgcagacaacgcgaagttgagctcctttagaccctcgtgcgaggcagtggagatctcaaagaccttcagcccgagtttctcgaactccggacgcacgaactcagccaattccttggcctcgggcacatcgatcttgttcagaatcacgatgcgcgggcgttcgggaatcgggatggcacccaacggcagctcgagcttgtcggcgtagagcgccaactcgttttccagcgcgtggtagtcggacatcgggtcgcggtccggttcaagcgtggcgcaatcgatcacatgggcgatgatttcggtacgttcgatgtggcgcaggaactccagtcccaggcccttgccttcggaggcgcccggaatcaggcccggcacgtcggcgatggtgtatcgagagtcgccggcgataacgacgccgagattcggcaccagcgtggtgaacgggtagtcggcgatcttcggcttggcggaactcatcgccgcaatcagggacgactttccggccgaggggaaaccgaccaacgccacgtcggcgatggacttcaattccaaaatcacgtcgcgctcttcaccgagttcgccgagcagggcgaagccgggggcgcggcgggtcttgttagccagggcgatgttgccgaggccgccggcaccgccttgggcgacgacgcagcggtcgccctcgtggcgcaggtcggcgagctgcgcgccgggatgcttggctttgccctgttcgccgcgcgcctcaaagacgacggtgccgcagggcacgggcagaatcaggtcctcgcccttggagccgtccttattgtcgcccaaacccatggtgccgctgccggcgacacgatgcggcatgaaacgatagtcgagcaggctggtggcgttacggtcggccacgaacaccacggaaccaccgtcgccgccattgccaccgttcgggccggccaacggcttgtatttctcacgacggatgccggccgaaccgttgcccccatcgccgcccttgacatggacggttactcgatccacaaaatcactcatattgattaccttacaaaaaagccgcgtccttacgggcgcggcttgaaaaaagcttgacgctatatcgctcaggcgatgacgtcgacaaccttgcggtcgcgacgcacaccgaacttcacggagccatcggtgagggcgaacagcgtgtgatccttgcccatgccgacgttgtggcccgggtggaagttggtgccacgctggcgaacgatgatgttgccggccacgacggcttcgccgccgaacttcttcacgccgaggtattgcgggttagaatcgcgaccgttgcgagagctggacgcacccttcttatgtgccatgattcatggtcctttctataactcaggcaatcgccgtgatcttgacgatagtcagcttctggcgatgacccttacggcgagcaacaccagtcttgttcttgtacttctggatgctaatcttcgggcccttggcttcgtcgttcacaacctcagccttgacggacaccttggccagatcggcggcggcaagggtgaccttgtcaccatcgacaacgagggagaccgggaattccacggtatcgcccttcttagcgtcgagacggttcacgaggatgacgtcgccaacctcgaccttttcctgatggccaccggccttcacaatcgcgtacattatcgttccttttatgttttggaaagctaccttgcctaacacgcaccgagcttgcggtcagacaccgagtttcgaatctacaccaccatgcggactaaatcaaatgatttttgcccgcgtgtcaagcacgacacacctgttacgcttccgcttactcttccgccgtgttgttggcagcgacggcagcggcggcaatctgagccagtttggctttgacgtcggcgctggaaccagccggttcgggagcgggagcggtgccgcgaccgtgcttgttggttttgacgaacgggtcgccaccgcgaagcgcgtagggatcgtcgtagtcggccgaaacggtcggctgatcatgcaggatgaaaccacggcccttgcaggtcgggcattcctcggagaacgcctcgaccagaccctggccgatgcgcttgcgggtcatctgcaccaaaccgagcgaggtgacttcggccacctgatgcttggtgcggtcgcgtgccaagcattcgaccaagcggcgcagcaccagatcgcggttggcgggcatgaccatatccacatagtcgatcatcaccatgccaccgatatcgcgcaggcgcagctggcgggcgatctcttcagacgcctccaggttgcaacgcgtcaccgtttcttccaaggacttgcccttgccgataaagcggccggtgttcacgtcaatggtggtcatggcttcggtgcgatcgatgacaatcgagccgccggacggcaggtagacctgacgctccatgcccttacgcagctgggagtcgatggaccacttgtcgaacacgtccttgccttcatgctcggccgggtcccacttctccagcttgtccttcaagtcgggggccatggtgtcaaggtattcctcgatacggtcgtagaccttgtcaccttccacgatgagcttgctgaagtcgtcgttgaagatgtcgcgcaccacgcggatggccacgtcgggctcgccctgcaggagcttcgggcgcttaccgtgccagaattcctcgcgcttggcgttgatgcgctcccactggcggaccagtgattcgagatccttgacgatggcgtcttcggatgcgccctcggctgcggtacggatgatcacgcccatgtctttcggggcgatcttggagacgatgttcttcagacggctgcgctcgcgctccgaaagcttgcggctcacgccggtcatgccgccggatggcacgagcaccaggaagcggccggcgagcgtgacctgagaggtcaggcgggcacccttgtggccgatcgggtccttagtgacctgcacgagcaccgggtcgccggacttgaacgccagctcgatgcggcgcggctggccttcgagacgagcggcatcccagttgacctcgccggcgtagagcacgccgttgcgggcctggccgatgtccacaaatgcggcctccatgctgggcagcacgttctgcacgcggccaaggtagatgttgccgacggtctgtacttcctgaatgtcggagacgtaatgctcgaccagaacattgtcttccaccacggaaatctgggtgtgatgttccttctcacgcaccaccatcaggcggtccacgttctcgcggcgtgcgaggaagtcctgttccatgagctggctctggcggctgcgctcacggcggttgtcacggcggcgctgcttcttggcctcgagacgagtggagccctccacatcagtgatctcgtcgatgtactgctgcttgcgggagcgtcggaccagcggctgttcgctgttctgactctggtcgtcggtgccctcgccgttcttgccgccacgacggcgacggcgacggcgagtaacggtctgctcctcatcgtcctcatcgcgatcacggtcatgatcatcgcgatcgtcacgacggcgggaacgcgtatcttcggcatcgttctcggcggtatcgtgctcgccgttggcaccggtttcgccgcgtgagccgcgacggcggcgacggcgcgaacgggtgcgggtggcgtcggattcttcgtcgccctcctcttcggcaatcggcgagtaggcgatatcgtccagctcgaggtcttcctcaatctgctcgacttcggcggctgcacggcgctcctgggcgttcaggcggcgggagcgacgggaacggcgggagtccgaggtgtcgtcggcgtcgaaatcgtcgtgatcggcgttggtatcgccggacgcggcgtcacgggaagcgtcacggtcggcggaggcgcggccgcgatcgtcgcggcgacggctgcgcggctgggcatcgtcatcgtcgtggctgcgcgagcggcgggagcgacgagacgggcgttcgtcggcgtcaacatcgtcatcacgagtgtcagcggtatcgtgcgcatccacggcggcgggcagtaccggttcctggaagagcagggacgtcatcggcttgccgcgacgcacggcctcgtggccagagggcagggattcgaccgcgttgaacaggcgctcatccggggtgtcctcgtgcgtatccgcaactgcacggcgagaacgacggcgaaccggacggtcctcgtcatcatcatccatatccatagacgcacggcgagagcgggagcgaaccgggcgatcctcgtagtcatcatcgtcggactggcgggagcgagagcggcggcgaaccgggcggtcctcgtcgtaatcgtcatcgtccacaaccgaacggcggcgggaacgtggggcgtcatcgtcatcgaaatcatcggcactgacagtgcggcgcgaacgacgaggacgatcatcctcgctatccgagtcggccactgcggaagcggcgcggcgcgaacggcggcgggttggacgttcggcggaatcctgggaatcgctggattcatcggaatcgctggaatcggctgacttggaatcggccgcagtgccggcatcgggaagcgcgggggcttcgaacagcggggcgcgttcctgcacttgcagttccagagaagcgccggcagcaccggtgccgcggaccacgcggcggccgccacgacgacggcgaacaggttcggcgggctgggaggcggcggcaggcgcagcgttcacggctgcagccgaatcggcattggatacggttgaattatcggttccgtcgttgacgaaaccttcacggttgtcagtgggcacaatgctcctcgcggcgcgctgcatcacgacgcctatttccaggcctatacgcttgtctcacaccacgctctcaccgtggccgcacgaaaacgcgccgcgtaaaggcaacttcgtctcaagtctgtcctgcgggtggcggacaccggcgcttgcgttgtctcattctcaagagccgcaaggggatcgacgccatctcgcacgctgatggttatgcagaaccaccatcctttagtatgccacatattttgtgcgggcgtggcccggcgaggctgacgttctctcggctcccctcccccgcggtgacagctcccctcagggaggggagctagagaggtgtcagaccagccagtcggtaaggattgcggccatggcggtcaggtcggattcaggcacctgctcgtcgtgcttgtgagccagcagcggatcgccggcaccgaggttgacggccgggataccgagctgagagaagcgtgccacgtcggtccagccgagcttggccagcgggtcgcggccagtgcgctccttgaccagtcggaccagatcctgggcgagcggggcgttcaggcccgggcgcgcggaggggctttcgtccttcatttcgatgccgtagccctcgaacacgccgccggtagccacatgctcgccattgccgagttcggcaccggcgtccgcgcccatcatcagagccttggcctcggccaacgacttgtccggggcgaagcggtagttgacgtgtacgcggcattcatccggaatgacgttcgtgcctttgccgccggagatcagcgtggcgttgaggccctcgcgataatcgagcccgtccacgttcacggtggccggctcgtaggcgttgagtcggttcagaatgtcggccgccttgtggatggcgttctcccccatccatgcacgggcggagtgcgcggccacgccgtgggttacgacgtcgaagcgaatcgtaccgttgcaaccgccctcgatgccgctgttggtgggctcgccgatgatggcgaaatcgccggtgatccaatcgggatgggcctcgacgactttgcgtaggccattcttttcggcgacgacttcctcatggtcgtagaagacgtaggtgaggtcgactttcggggtggtttccggcgtgcggccgtcgagcgtggcggcgaggtagagcatcaccgcgtcggaggccttcatatcggtggcaccgcggccccacagcacgcggtcttcgggatgagcgtgggcgatttcttcgcgaatcagcgaatcgccgggctccagccacttcggcgggaaattgtcgatgaccggcacagtatcgaggtgcccggccaagatcacacggttcggctcgccgaagtcggtgctggccaccactgtgtcgccgtgacggcggacggtcaggtgctcttgctcgttaaggaaggcctcgacctcgttggtgagggggccctcgtggtcggacacggagaagttctccatgatctgggtgagcaggctgttcagctgctcggcagtggatgcggtgcggttcaattcaagcgtcatgtgaacagcgtaccgcgtgggcggcgggcccagcacacccactacatgagattttgcggccgaatacatttttatgtgccacactggggtggcgaaagggaggattatgtcaggtctaatcagcgccatgcaaggcttctgcgttatcggcatcgtgattgcggtgggatatgttgccgcacgaatgcgaatcggcgggccgtccgctcagatggtgctcaaccggttctccttcttcgtatcgagcccgtgcctgatgttcgccatcctctccaaggaaccgatcttcgacatcttccatccctcgattatcgtggcgttcttctccgccgtgctggtaggcgtggtgttcctggtgctcaaccgcatgttcttccacctgaatgccccggacgccaccatcggtgccctgaattcgctgtacctcaattccaataacatcggcctgccaatcgccacctacattctgggcaatccggctcttgtggcaccgattctggtcatgcagcaggccatcttcacaccggtgggcctgacagtgctggacgtgaccaccaagggcaaggtctccatcaaggaaatcgccaagcagccactgcatcagccgctgcttatcggctcgctgctgggcattgtggtctctgcgatttccgctaaaagcggctggttcccagtgccgaaattcattttcgacccgatcgacatgatcggcgattcggctgtgccaatgatcctgatggcgttcggcatgtccctgcacggcaccaagccgctacagcagaagggcgatcgcccggccatcttcacggtcgcggtcctcaagaacatcatcatgccaattatcgcgttcctgctcgcctacttcgtgatgggcttccgcggctccgagctgtacgcctgcgtggtactcgccgctctgcccaccggccagaacgtatacaactacgcggcccgctacaacgtgggtctcaccttcgcgcgcgacggcattctgatgagcaccatgaccagcccggtgtttatcgcgatcatcgcggcgctgctgtcgtgatgggtgcgcagagaagcgttctcaatagtatccgtgcgcgcaaatgcacagatatcgcacaaacgaacatttgctcatccgcatatttgcggtgatttcagcgtttctacgttcgatttgcgtatacgaaagtacgcacagttgttattgagaacgattcgctgcgcagctcggctcagtcatcagcccgataatcggtcagattcaagctggccgccacatgattggacgcgaacgcgccgatggaaaccagcgcatagcacaacacaagcccgccgaagaagctggccagcgtggccggttcggtcatcgaagcggcgaacagaggggccataagcagcatggaacagccgccggccacgatcaccacgatgttgagcggggtgagtacctcgatgaatcgcgcacggttcaaggtcttgacatcagtgccctccaacaccagcatgcgatattcgccggcctgatcgtacacgctgccggcctgcatcacaccggagctgaccgcggcaagcacagcggcgaacacgagcgtcagaatgccgccggtgccgatgtcgcgaatgaacacggtgaacgggtcgttggcgtcatcgaccacggcggccgatccgaagaatccgcagatcgacgtgatgccggcgataaacacggccaacgcaatgccggacacattgcgccaggcgcgcttagggttgtcgagaatacggcgcatggcaatcatcgtggccgcatccttggggcgcttggccttggccttggcgcgagcggtgatcacccacgtgccgataagattcaccagcgcgaagcacagcagcatgaaaccgatgatcacgccgtacatcaccgcctggccggcctgagccagcatggccgggttcttgaagacgatcatggccaccaccacgactaccacgaacagcaccatacgggtgcctgagggcaatgcggtggcggtgcgcgaggtgacacccaatggggtgattgccacgcggcgcaaggtgaccagcgacgatatcagcgccaagatggccacgcccgccaaggtgattaccagcgccagcgggccgacccatagctgttcgaaggtgaaccgctgctcctggaagggaatcagcatgactgccggcatcagggcgcaatagccggcaatgccgataagcgcgccgatcagcgcctgtccggcggcgtcaagcgcggtgagacgcaccacctgaccggtggtcgcgccggccagacgcagggcggcgagacgggcgtcgcggcgggatgcggccagtcgtgcggcggaaccggcgagcgccacgaacggcacgacgagcagcatgcaggcgaataccgccaacgccacataggcggtggagaattgggccaggctcgtcgggtcgctgatctgccgtttccacgcggccaccgtatcgggccggcaggcaccgaagtcgaacgcgcaggcgacggtatgatcggccgaagcccgccagatgaaaccgtgtacgccgccgagcacggtgaggaagatggtggtggctgcggcgaaggcgatgattgccagcatcgaggtgtggccggcgctgccgcgcaagccggggcggtgaaacagccgccagagggcgaacgtgctcatcgcgcgcctcctgcggtggtttcgctcccgccggcgggggcggagttggggttggcgtctgtctggtgcagacggccgtcctgcatcattacggtacggccgcagaacgaagcgacgttggggtcgtgggtgacgacgaccacggcggaaccgttgtcccgcgcggcggccatgagaatgcccatgacctcgcggccggtggcttggtcgagcgcgccggtcggctcgtcggcgaagaccacggcaggtttgacggcgagtgcacgggcgatggcgatgcgctgcatctgtccgccgctcatctcccccggccggtgcgtggcgagcgcgcgcaatcccatgcgttccagccacaggatcgccgtgtcggtggcggtgcggtagggcatgccgtcaagcatcatcggcagggcgatgttttcgaccgccggcagttcgggcagcagctggccggactggaagacgaagccgaaggcattgcggcgcagtttggtgcgctcggcgtcgctcatgcggctcaggtcggcaccacggaagatgacggtgccggcggtcggcttaatgatgccggcgagcgcgtgcagcaaagtggatttgccggagccggacgggcccatcacggctaccgtctcgccctcccggagcgtgaagttcacgtggctcagggcgagcgtgtgcatggtcggcatggcgaagccgggctgggctggctgggatggctggccggcctgaatggcacccggtccggccgcagcgggattcgccgacgcataaccggctcccgtgccggctggcatcacgccggtgacgccgtgcccggcctgtgcgcgggccatgctggcggtgtagtccatgaccaggtcgtgggcctcgatgaccggggcccactgctgggtgtgcgatgccggctgctggaactgttggggttgctgagactgctgaggctgagccgccggtcccggcgccggctgaggctgctgcaattgcgatgctgctgtattcatactcccgagcgtacggagcgaacgcccagccgaccatcgggctgcggtatgaacctttctggattaccggcccactcctcatccgcaaggattagagatacgcagtcgacgtgacaatccatatatcagatgttcattgctcgagaagacgaggaacagtggaagaccggttcggaagctggaaccacataggctggttcggctggatatgcgaatcgcacgcacggtatgttcagggaaccagcgcgctgcgcgcctgtacatcgaacagaccaagcaaaggagcccacatggccatcgcaatcgacatcccgcacacaccaatcgtgtccgtacaaaagtcgtacaacaggagtatgactacagagaataacaagaacagtcgttttgaaatgagactcacctaagagcaacgttccagaatcgaccaagcggccgagtccaaaggcatgacttcgttgcaatgggcattatcgaatctgctcgccgccgcagatcgggacatccatgaagctcatatcattcggctcaacagtaaagcgtggaatgatttcaccgcagcattaaacgaacctatgggcctacgtctgaatgaattgttggagcgtgatcccatatggacgtgaccaacttcactgagcctcggcacctgactgcgagcgaggatatttctggtttcgactgcggcctgccattggtcaatgattggctggtttccacacactaagtgcatacagcattgagcattcggaagctcccggttggctgaggcgaaatagtccgaaccccattcccgtaattttgctaggcatgatgggcgtggatatcagatttcaaaccatgcacgtcgacagtcagttactccgagatgcggtacttcattctctgaacgatatgattttcggcatatccctgaatcatctagaatgtttactccgctcaatgtccacaatcaccaatgattaatggctggagaccgctatttgacgccgaccattgtctgaatcgcattcagacacaacactcctcattgcgcgcagaccagcgagttccgccgagtcggcgatgtgtctcttcggcggttgatttaggattttccgcatgcgacagctgaccacaccgctaaaaatgccattttcgcactgacttggggcggaggtcgtggcgaaacgcacgaggaaacgtgtgtcatccgatatggtcatgcccgccaggcattgaagcgtcctgtctatgcgcggttgatgtcccggtggcggggtcaatcgatcgacatacgaaccgggacagattcggctgtcccggttcgggatttcggcctcttttggcgaaccgggacaggcccttccatgaacacccgatatatgtaaatccaaaaccccggaattccgccattccccgacggcgaccatcgcacgatagggcgtcaggtgaatgagattctgtcccggttgcccaaaaagaggcaaaatgacgaaccgggacagcgaaatctgtcccggttgtcccaaaagagacgaaatgacgaaccgggacagcagaatccgtcccggtccacacgcggttcacacggcattacccaagtaaactcatcggcaaaacattggcccagccaacaccactaccgatgtccagcacaggccagctcgtccaggcgggcggcgaagcggggccagtcggtcttcatagcggtgaggagcttgcggttgggcacgtcgtcaatcgggacccagcagatttccatgctttcgtcgtcgtttgccttgggctcgacggtgtggccgggcttttcaaaggcaaacacggtggtgtaggcccacgggccatggtcctcgcggtaggagccgaccacctcgatgtcttcgggggtgatgttggcttcctcgtagctttcgcgcagcgcgccttcgatggacgattcgccgtccgcggtggcaccgccgggaataccccacgtgccgccttcggcgctccacgcggcgcgatgttgcatgaccacgtgggtcaccttgccactcaccgggtcgcgacgagccagcagaataccggaagcaccgttggtgccccaatgcttgcggccgcaggcgcagtccacccagccatcgccgggctggtgtacgttttcgaccggcggcagaatgccagcgtgctggttgcccgaggccttgctttccggctccagttcgccacggccgacattccacaggtcggtccacgtgatgcccagttcgccggccagatgccgggccagcggcaggctgaggccgatgataccgtgcggatcgccctcgatgctgtcgatgaacgcgccgccgaagccttccagcgtgaacgatccggcgacttccagcggctcgccggtgacgatgtaccgttcgatgtcgtcatcggtgaattcgccgaaatggactttggcatggcttgcgccgcgcacggtacgtccggtcgcgaaatcgatcaggcagtggccggtccagagttcaccggtcgcgccgctcatgcgcttcagtcgttcgcgggccacggcttcgctgtgcggcttgccgtagcattcgccgtccaggaggaacatcgaatcacagccgagaatcagcgggccgaccgtcgcctcggtcagtcccgtctgtccggcaatagcggtggcgatgggttcggtgatggtcggcatgtcgatgccggagaagtcgcgcgtggtggcgacttccgccttggaatagtcgatgggctggccagcggcggctttgcgcaggtcttcgacgacggcttcgcgttccgaatccttgatttccttggccttgagcgggtaggcaatcacgcgatcgccggttgcggcggcggcagtattggccacatcgcgatacgcacggtgaacggcctcggccttggctacggcaagaatcatcacacgctgcttgatgctcaaatcgtcgacggtgacaccttcctcacgggcggccgcttccagcgcagcaggctcatccacgtgcgagacgcgaattgtggggcagatacccgccgaatacagcacgtcacggcgaggcttggacttggaagcaagaattagcggaatggacatgacttaagtccttatgctcccgctggcgggagctgtcgaacgaagtgagactgagggtggtctctgccggtatggcggaccaccctcagaccgcctgcggcggccagctcccgccagcgggagccttctcctcgacttagcgacgctcgatttcgacgccggcggtgttgatgggcaggtgaagcacacgccaatggccggaagcaagctgctccgatgcgatctggtcgatggcttcgcgggcgttgccgtaatgcagcacgagcacgcaggggccggcaccggagactgcggcggcatagcccttggagcggaagagcgcaatgagctcggtggacggcggcatcagggcaccgcgatacggctggtgcagtttgtcctgcgtggcggtgaacagcagcgcgttggactgggcctgagcggccgcaagctcgtcagcgaacgccgattcacgggttccgccagcgcaagcgcacgtatcggcatcctgagccggggcagcggcgacgccggacttgccctgctgggcggcctgagccagcaccacgggattcatcgcagcgggcagcagacccacgcgagacacgttgtagacggcgtccttgtatggcagttccctaggcagcgcctgacgggccttctcagtggacagctcatagtcgggcacgaacacggcggcggtgatggacgggtccaccgggtagttgacggcgtggaatccgccgtgcagcggttcaccaccaggaacggcgaccgagccgacgccttctgcggtttcgaagtcccaagagacggtcaggccaccgaacacagccggggccacattgtccgggtgtccttcaatctgggcggccatatcgaagacggccggacggttgaggtcaccggtctgggcgaaggccgcggcggcggcgatgccggccacaatggcctcggcggaagagcccatgccacgagcctgagggatgttgttggtcgcttccagcgtgaagccgagtcggccgaggccgaacgtggcacaggcacggcggaaggtggagaccacgaggtgggtttcgtcgcatgggagggcgtcggcaccctcgccgtggatgatcacgtgggcaatgccgtcgttcgggtcgtcgttgagcgtgaaagtgagctcgtcatggtagtcgagcgccagacccacggtatcgaagccggagccgaggttggcggacgtggcgggcacgcgcacgtgaacgctattgcagattgggttcatggttgttccttaaaaaggagctccccttgtcagagggagcttgggtattcagctttcaactcacgggcagccgttcgaccgcctcatcagagggagcctagacggtgtcagtccagcacgcgcaggatggacgggtcaccggtgacgaagtcgagcgcctgcacggccttgacggtgttgcgcagggtttcctcgtcggtcaggtgggtcacgatgcgcaactgctgaatctcgccgtcgtagccggggtcggtcatggtgggcttcagatcctggttcacaccgttgatggagacaccgttcttggcgaactcggcggcgatggcggccagcacgcccggcttgtcgtggatcaggaagcgcacggcgaatgcagccttggaggcggtaatcggagccttcggcagattcttgtacagcgggatggacgggccggtgcagccagcagcaatgtggcgggcttcggtcaccacgtcgcccacgacggcggaggcggtcggagcgccgccggcgccacggccgtagaacatgaggtcgtcggcggcctcggccttgacgaacacggcgttgaaggagccgtgcacggaggccagcgggtggttctcgtcgatcagggccgggtagacgcgggcggagacgccggcctcgccgttctcgaccacggcgagcagcttgatgaccttgtgctcggcggtggcggcggcgatgtcgtcggcggtgatcttggtgatgccttcgacggacacgtcgtcgatggtcacggaggtgtggaagccgagggtggccatgatggcggccttgttggcagcatcgtagccttcgatgtcgccggtcgggtcggcttcggcgtagcccttggcctgggcgtccttgagcacgtcgtcaaactggagacccttggtggtcatctcgtcgaggatgtagttggtggtgccgttgacgatgccgagcatgctggtcaccttgtcgccgaccaaggactcgcgcagcgggcgaaggaacggaatcgcgccacccacagcggcctcgaagtagatgtcgacgcccttggcctcggcggcggagtagatctccgggccgtacttggccagcagcgccttgttggcggtgaccacggaagcaccggattcgatggcggcaagcacgaacttgcgggccacggtggtgccgccgatgagctcgatgacgatgtccgagttggtggccacgctcaaagtatcggtggtgacgatggactggtcgatccacgggaacttctcagtttccttcgggtcgaggcaggcgacgccggtcagttcgaccgggcggccgatacgagcggacagttcgtccttctgctcgacaatcaggcgggcggtctgggagccgacggtgccggcaccaagcaggcctacgcgaatcggggtttcgttgttgcgagccaattcagggtccttccaaaaagttttctatatcccaccgctattttacggattatttccgacagcagaccgaaagtactcatcaaagctgacggtccttttcgtattatgacggatttggccgcacattacagactgtcaggcgctcgcctctgcacgtggatcactcgctgacgtcgaggttgagtaggtcgtctacggtctggcggcggagcatgacgtgcgcaccggactcgctgacagcaaccaccgccggaatcagcgcttggttgtagttgctggccatggtgcggccgtatgcgccggtaaccggcacggcgagaatgtcaccgcgcttcaaatcggcgggcaactgcacctcgtgaaccacgatgtcgccggattcgcagtgcataccgcacacacgggcaagcatcgtttcagcggaaccggtgcgattcgccagacgcgcggtgtagtcggcaccgtagagtgccgggcgaatgttgtcggacatgccgccatccacagacacatacacgcgctcggcaatcgggttgccgtcactgtctttggcatcggacaagtgcacgtgcttgatggtgcccacgcggtacagggttacgccggcgggcgccacgatgtagcggccgggctcgaagctgatggccggggcgggcatgccgagcgcacggttggtgctgttgaccgcatccgccaagcgagtgagttccacgtcaatgtccattgaatcttcgccatcggtgtaggccacggagtagccgccgccgaggtcgatttcgggcaggatgtaggcgtcggtggcccacagggtcttgcgcagcagcatcatgcgcttggccgcgtgaatgaaggcgtccgcatcgtggatgttggagccgatgtgcgagtgggctccgaccagttcgagtacgtcctggttggcgaggatggtcttgagcacggcgatggacggaccgtccgcaatggcttccatcgcggcggccagcgccttgtctgtgtcggagacttcctcgtggctcaggtcgtacgggtacttgacgtcgtagtgcagctcgcgctctgatttctcggtcttttccgcgccattttccggggaatgcgtcgcagagatacgcgcgttggtagcggcaggcgtcacgtctttgaggtcgttcagcacgtcgagcacggcggcgtcggccccggcggccagcagcggcacgccgaacttctggtcctcgtgagcagtggagatgtactcgtggccgccggcgtggacaccgacggtgacgcgcagcatcacacgggcgcgtttgccgagcttgcgggcgatggcagcaacgcgctccggctcgtcgggctcgtcgatcacgattttggcgaagccctgttcgatggccagcgcgatttcctcatcggacttgttgttgccgtgcagcaccagacgacgtccgggaacgccagcggcgagggcgattttcatctcgcccatcgtgcaagtgtccacaaacatgccggtctcggtgaccaatcgcacgacttctttggacaagaacgccttgccggcaaagctcacgtgcgtagtggaggtgttgaatgcttcggcggcagcgcgcacgaagtgcctagcacgtgcgactacttcatcagtgtcgatgagatagagcggcgagccgaactcgtcaagcagcgattcggcggtacgaccatgaaattcgatggagccttcggcattcacagccgtagcggccggccaaattggagaaataggcataatcacatcttttcgggggcggtgacgccgaggaggtcgaggccgttggcgatgacctgctggacggcgtcattgagcttcaggcgggcggcggcacgggccggctccgggttcttggcaatctccaaggccttgcgagcctcgtcgtcgccacggatttccggatcggtcagggccatcggcaccacgcgctctacgttgtaccacttgtgataggtggcggccagttcttcgaggtaacgggccaccttgtgcggctggcggtcgtcggccgcagtggcgagcacgctcgggaattgggcgagggcggcgagcacttcgccgtcggcctcggtgtcgagcagggccaggtcggcaccctcgtagctgatgccggcagcggctgcgttgcggtccacgttcttggagcgggcgtgcgcgtactgcacgtagtacaccgggttgtcgttggtgtgcgaggcgagcagggccaagtcgatgtcgaagttctggttgtaatcggagcgggccagcgagtagcgggcggcgtccacgccgaccacggagaccaggtcgtcgatggtcacgacgttgccggcgcgcttggacatgcgcacgggcttgccgtccttcatcacgttgaccagctggccgatgagaatctgcatgttcttgccgggctcatcgccgaaggccgcgcacatggccatcatgcggccgatgtagccgtggtggtccgcgccaagcatgtagatggccacgtcggccgagttttcggcgcgatggcgcttgtcccagtagtaggcgatgtcggcggcgaagtaggcgaactcaccattggacttgatgatcacacggtccttgtcgtcgccgtgcttggtggattcaaaccaagtggcgccgtccttgtcgaagatgtcgccgcgggacttgagctcttcgatggcggcgtcgaccttgccgtcggcgtacaggctgttttcatggaaccagacgtcgaagttcacgcggaagtccttcatggacttctgaatctcgtcgaacatcatcggtacggcgcgcttgcggaattcctcgcgcacttcggtatcggcctcgccgagcggttcaccgtcatcgttcaggccctgatcctggtgggccagtgcggtcaggtccacgccgtcggactcggcttcggcctgaacacgggcggcgatctcgttgatgtaggcacccttgtagccgtcgcacggggtttcggtctggtagccggcctcacccaagttattggcctcggcccaagcggcgaccagcgacttggcgaagcggttgatctgctcgccgtggtcgttgaagtagtattcgcgcaccaccttggcgccgttggcctcgagcacgcgggccatggcatcgccgacggcagcccaacgggtgccgccgatgtgaatcggaccggtggggttggcggagacgaactcgagattcagggtctggccgcccagatggtcgttgcagccgtattcgttgaccttgttgagatgcttgtcggcgtcggtcacggcaccggcggcgagtacggtgtccaccacggcggcggccgaggcggagtcaagcgtgatgttgatgaagccggggcctgccacctcgaccttggcaatgccgtcggcttcagcgagcgcggcggcgaacggctcggccagatcgcgcggcttcatgccggccttcttggccagctgcatggcgatgttggaggcccagtcgccatgtgcacggtccttcgggcgcatcacggcgagcttgtcgacgggcggaatcagctcgtcggtcaacgcgccggcctggccggcggcgacgaggttgtgggcaatgctggaaatcagttcacttaaggcttcaggactcattcttctaaggatactgagaacggcgacacttgcgctctggtatgcctatatgctgcccctgctggcgggggcaagcacacagccgaaagataccaagcgaaaaagggtaggcgacaatcgccggaatcgttggaggctcgccgaaaccgctatacataccgtcggtcggtatctatagtgatctgcaacatcaagcacagtagggaggccaccatggcacgtaacgctcaccccgaggtgacgcgcacccgcatcctcgacgccgcacaacggctgttcatggcccagggctatgagcacacctccatccagaacatcgtggacgagctcggcgacctctccaaaggcgcgatctaccatcacttcaaatccaaggaagccatcctcgaagagctcatcaaccgagacaacaatgtgcaggacgacttcaacgaatccgtcatgaatcgcactgaccttaccgccctcgaaaagttccgcgtgctatggcggcattcgatgaccgagcaagaccacgtgcagatcatgcgagccgccatgccgatgctgagcgatccggtttcgttcgccgcgaatatgcaggtatggagcaagcatctgcccgaacgcttcctgccgctgatcgaggcgggcgtcaaggatggctccatccccaccgagtatccgcgcgaggccgccgagctgctttcgttgctgccgaattattggctgatgccgtatttctacccggcgaccctgcccgaaatggagcatcgcatccgctgcttggccaccatgctcgacgcgatcggcgtgccgattttcgatgacgagctcatcacggtcgccgcgaagggcatgatgacgttcgcaggggagccggagaaaggctcagaatgaatagcacagtgaaacccgagaatgacatcgccggcaccgccacccaacgcccgctgctgtcccgcgacttcgtgctgctggtcgccggacaaggcatctcgctgttcggcaatatgatgctgcgattcgcgatgtcgatgtgggtgctggacaaaaccggctcagccaccatcttcgcctcggtgctggccatctccatcgtgccgaccatcctgctctccccgttcggaggcgtgctggccgatcgcgtcaaccgccgcaccatcatggtggcgctcgacgccatctccgccgtgctcgtgctggcgagcgccatcgtcttcgccaccacgggcttccatatcgtagccatcgccaccatgcaggtgctgctcgccgtgctcggcgccttcgaaaccccgaccgtgcaggccgcactcccccagatgttccggcagtacggcccggccaccatgcgccaaggcatggccgtgatcaatcaggtccaacaactaagcagtctgctgccgagcttcctcggcggcgtgctgtatgcgatgttcggcatccgtctcatgatgatcatcgccatcgcaagcttcgccggcgcagccgcgctcgaatgcttcatccgcctcagtgccccggatcgcggcgacgaggagctgcccaccccacttgaagacctcaaggcaggcgtgcgattcctcatcaaggaccggccgaacgtgttcagactgctgttgttcgcggcggcgctcaactttgtgcttatcggctattccggcgtcggcttcccgtacacgattcgtacagtgctcggcttcgacgccactgtctacggcatcgccgacggcctgatcggtgtttccggcgtggcgggcgcattcatcgccggcctgttcgccgccaagctcacgatgcgctggctgccggggctgatggcgacgcttacgctggccatggtcccacagggtattgtgttcctgctgccggtcgacgcatggaccaaactcgtggtgctgatcgtattcacctgcggcacgatggtcgccagttgcttcacgaatctcatcgccgtgcccgccatccagctcagtacgcccgaggcaatggccggcaaagtgatgtccatggccgcggccgtgagcatgtgcgcccagccgctcggccagatggtgtacggctgggcctacgaccaaatgccggtcgccatcgtgctgttcatcaccaccgccctgttcgccgtgctcaccgtgctgatggttccgctcgccaagcagttcgaggactgacgatcggcgcgcacgccacatcctgccgcccggccataattgaatcaccgcacgaaaaggcacgaaaaggcacgaaagaggtacctatggccacgctcaacccccaatcattggtcacgttgtggcaaatcgaacagtatggttcgttctccgccacggccaaggccacgggttggtcgcagccggccatcagccagcagatcaaaaagctggaggcacagtgcggttcgactctggtgcaacgcacctcgcatggcgtggaactcaccgccaccggttcgatgctcgcccgccacggcgaggccatcgccgatcggctggagcgggcggcccgtgaagtcgaggattatcggcatcatcggtttgatcacctgcatttggtggccccaccgtcaatctgctctactatcgcggcccgtaccgtggtcaagctcagtatgttcacggacatcgagctgagcctgattcagatggagccgccggaggcgatcggtctgatttcccaaggcaaggccgataccgccgccgtgttccgctacagcagcatcccgaacttcctgcacatcggcgacgacctgaccttccattcgctgggttacgatccgatgcgactgctggtgcgccgctccagcggcatcgccaaacgattcgaggagaccggcgaacctgtgccgctgtccgccgccaaagacgagcattggatcgccggctgccccacctgccgcgcaaatttggtgaaactggccacccgtgccggattcaagccggatatccgccactgcacggatgattactgggccacgcagaacctggtcgaggttggtatgggcgtctcgctggtgccggcgctcgatacgcatatcaacttgcagggcgatctggtggcctgtcccattgccgacgattttgcggcgcgcgaggtcggcatcgtgactcgtgccggcgaccatcgccccgcgcttggttcattgctcgaggagctcgagcgcacgtcactcaaatatttgagtgccaagtagtcgcacagcgataagcaagcttgcgagcgccatcacgatttcggggagccagaccgttgagcagcccttctgcaccgggaacaatgacatgttatgagcatgaacaacattccccagtcaacgactttgagcaacacaaccgccggcacctcttgctttgatgccaatcacatcgacgtgacgaccatcgaggatctggagcaggtcggttcggataaatggacccgttaccccggctgcatcggcgcattcatcgccgagatggattacggtctggcaccgtgcgtggccgaagccatcgaagaggctactgaacgtggcgcgctcggctacattcccgacccgtggaagaaggaggtcgcccgctcgtgcgccgcatggcagcgccgctacggctgggaggtggatccaacgtgcatccgcccggtgccggacgtgctggaggcgttcgaagtgttcctgcgcgagatcgtgcgcgccggtaactccatcgtggtaccgactccggcctatatgccgttcctaagtgtgccgcgtctgtatggcgtggaggtccttgagattccgatgctgtgcgcgggcgccggcgagagcagcgggcgcaatgatgaatggctgttcgatttcgacgccattgagcaggcgttcgcgaacggctgccatgccttcgtgctgtgcaacccgcacaacccgatcggcaaggtattgacgcgcgaagaaatgctgcgattgtccgatctggccgccaagtacgacgtgcgtatattctccgatgagattcacgcgccgttcgtctaccaaggccacacgcatgtgccattcgcctcaatcaaccggcagacggccatgcaggctttcacctccacttcagcctcgaagtcgttcaacattcccggcaccaagtgcgcgcaggtgattctcaccaatccggacgatctggaactatggatgaggaacgcggaatggtccgagcaccagacggccaccatcggtgccatagccaccactgcggcctatgacggcggcgcggcatggttcgagggcgtgatggcatatatcgagcgcaatatcgcgctggtcaacgagcagatgcgcacgagattcgccaaggtgcgctatgtggagccgcagggcacgtatatcgcgtggctggatttctcgccactgggcatcggcgacccggccaactatttctttaagaaggccaacgtggcgttgacagacggccgtgaatgcggcgaggtcgggcgcggttgcgtgcgtatgaacttcgccatgccctacccgctactggaggaatgcttcgaccgcatggccgccgcacttgaggcggacgggttgttgtagaacagaattgcggctcccctcaaagaggggagccgaggaacggccgaattagtcgaagtcggcaccgagggcttcgagtttgccgcggaagtcggcatagcctcggtcgatcaggctgatgccgtgcacgtccgaggggcctgacgcggccaaggccgcgatcagatggctgaacccaccacgcaggtccggcacgtcgatgtcgcgtccggtcagcggggtcggtccgaagatcacggcggaatgcttgtagttgcgctgccggaaacggcacggcagcgagcccaggcactcgcggtacaactggatggtggcacccatctcgaccagcggcttggtgaagccgaaacggttctcgtacacggtctcgtgcacgatcgacaggccgttggcctgggtcagggccaccacgagcggctgctgccagtcggtcatgaacccgggatgcacgtccgtctcgatcgccacgggcttcaagtccccgcccggatgccagaaacgaatgcccttgtccgtcacctcgaatttgccgcccaccttgcggaacacgttgaggaacgtgatcatctccggctgggtggcacccttgacgaaaatgtcaccgtgcgtggcgagcgcggcggacgcccaggacgccgcctcgatgcgatccgtcagcgacgtgtgcgtgtacccctgcagttccttgacaccctcgatgcggaaggtgcgatcaacgtccacagaaatgattgcacccatcttctgcagcacgcacaccagatccatgatctccggctcagtggccgcgcccgacagttcggtcttgccctcggccagcacggccgccagtaaagtctgctcggtggcgcccaccgacgggtagggcaggtggatcttcgcgccgtgcaggccgttgggcgcggtgatgtggatgccgtccttgtgttccttgtccaccgtggcgcccagcttgcgcagcgtctccagatggaagtcaatcggacgtccgccaatcgcgcagccgcccaacgcgggaatgaacgcttcacccaaacggtgcacgagcgggccggaaaacaggatcgggatgcgcgacgaaccggacagtgtatccacgtcggccacatcggccagctgcacacgcgaggcgtcgatggtcacaatgccgttcgcaccgtccacatccacgtccacgccgtgcagacgtagcaaatcggacaccacatgcacgtcacgaatctccggcacgttcttcagcaccgacttgcccggtgccagcaacgcggcgaccatcgccttgctcacgaagttcttcgcgccacgcaccttgatcgtgccattcaaaggcttgccgccctcgacatgcaacacgtcatccggattctcagccacgccactctcctcaatcaatcaagattcaaaaaatgctaccgtccagtttgccataagccatgtgccgactccgtgaaatgcaccccagccgaactttgatcaccgtgcacaacggatcccatacccccgtcgaatcaaaccgataacgtgatcttcctcacatttgccgccacgacgttctccatacttctacgctacgattcagggcaatggcatcagacgccatgtccacaagcaaaggagcattcatgaccacagtcgccgtcatcggctgcacgcacgccggcacgttcgccacaacctcgattctcgccgagcaccccgattggaccgtccatgttttcgagcgcaacggtacgctgtccttcctctcctgcggcatcgccctgtgggtgggcgaccacgtatccgacccgaagaaaatgttctactcctcccctgccgctctggccgaagccggcgcgaccatgcatatgcgcaccgacgtgacgtccgtggacctcgacgccagaaccctcacctaccgcgcgctggacgaggccggagaccccgccgaacagaccctcgctttcgacaaactggtcgtgaccaccggctcgcgcccggtcatcccgccgatccccggcatcgacagcccgcatgtgctgctgtgcaagaactgggatcacgccatcgccatcaaggaaaaggcgaaaaccgccaagtcggcagtggtgatcgggtcgggctatatcggcgcggaaatcgccgagcagttcagcgtcaccggcgtcaagaccacgctggtcgacggccttgatcgcccgctggccaataatttcgataagaccatcaccgatcaggtggcggccgcgttcgaggagcacggcgtcacgctcgcgctcggccagaaggtggtcgagttccgcgacaatgacgacgacaccgtcactgtggtcaccgaaaagggcgagtacacggccgaaatggcgattctggccgtcggcttcctgccgaacaccgacctgctcaagggcaaggtggacatgctgccgaacggcgcgatcgtggtcgacgactacatgcaggcgtccgcgccgggcgtgtacgccgccggcgactccgccaccgtgttctacaaccccaccggccagcacgattacattccgctggccaccaacgcggtgcgccagggcctgctggtgggccgcaacatcgagacgccgaccgtgaagtacatgggcacgcaggccacgtccgccgtgcagctgtacgatctctcgctcgccgcctccggcctgacccgcgccggtgccgaacgccgcgggctcacggtccgcgagacctcgctcaccgaggattatcgcccggacttcatgctcaccaccaccccagtcacgtcgattctgacctgggacccggaaacccgcaaggtcaagggcggccagttctgttccaaggccgatatctccggcgcggcaaacgtgatttccatggcgattcaggccggcttcaccatcgaccagctcgccaacgtggacttcctgttccagccgaacttcgacaagccggtctactacgtcggcgccgtggccatgaaggcggcggccgagtaagacggctgtacccaccgcaaaaagaaaccccggcgtgatgggcgccggggagagaaaggaggagaagaagaaagaggttaagttatgcagcttgttcggccgtgattacatataacaacaccagtttcaatgcaacgtgggcactggctgggaattgtctgggaatcacggcccgtacaggctgtttcttgttttggagccgatttaccggctcgccttgatcttgtgggccagctcggcgtcccacatcgcgccggtggcggacatcaccgagtccgcgccggcgtcacggtacgcctggtagtcggcgggcgagaccacgccgccgacgccgttgatcgcgaaatcgagcccgagcttctcgcggatcgcggccagacgggcgaccatgtcgaggccggcaccacgaatcgcattgccacacacgccggagcgatcacggcctgcaccgggcagggcctgattgccattggcatcgaccagtttggcggaaatcgtattgatggtgctgaatccctgcacagtgccgtggcccacggtggaacgcaccatgagttcaaggtcgccgtcgctggggatgtaggcgagcttgaccatcagcgggatgtcgccgatctcctgcttcacggcctcggtgatgcggcccacgagcagcggattgtggcatagcaggcggttgtggccctcgttggggcagctggtgttcatcaccatgagcttggcaccggtctccttgaccaggcgggcggtagtggcatggtcggcgatgtattcctcctcgctcatgccctccacacgcgagccttggaagctcgggaccagcacttgaccgggaccggcggcctcgatggcggcgcgcatgtccggctgccagacgtcagggctctgcgagggcacaccgaagctgttggagatggaaatcggctgttcatagttggtgtcggccagcacgccttcgtccagttcggcgctgcccggcgtcagtgaaccgtccgccgacttggggtgtacggcgagcacgttcgggaacgggttgcagccccaggcgcgcgaacgcacggttttgtaggtcgccagatcgaaacccatgtggaaagcggccgtagtgaaacggctgttgagcagcgggcctgcgggaatgccgaaaggcaggttgaccggctggcccaaaaaggtggccaaggcaccctcggaggcaccctcgctggtggttccggcggcatcggcaccgttgccatccttcagcgcctcggcgaacgcgccgaacggcccttgctcatagttgtcttcgtaactgcggctgacatcgtaaaacggctcaaaatcactcatgcttcaacgataagccaacctgcatgcgcacacgcacactcaacccatcatcgcgccgacaaacgaaataatggcgaaagcggcattggctaccacaaagatgatgaacgtcggagctgcccagccaaagtacgtgtctggaatactacgattcgtacggtgatattggcgcaaacttaaatagtgcaaacacaccctagaagagataggagggaatggcactttctcgcgttgttggtggaagtatttgggatgctaagcgagttgccgcattggaaccagacgattgcgtgaagtgaccctatacgtaaaaggtctcactggcgagagccagtgagacctttgtctgatgcgatgcgagcgacccaataatctcaatcagacacagagccaacggccctgggcctgcaattatggactcgcctttcggcgaggctcaatgctggcctcgctgctgtcgcagctcggcaggccgatcgcggctaaataatgccgcgatcggccaacggccctgtccagtctgcgtcctcaggctcgcgggcggactcgattctttcttcggcccagtgtttggcggggatggtcttgggcttgaaggggaacttttcggcgcgcatcttttcgtaggcggcgatgtcgtcctcgtgctgcagcgtcagatcgatatcgtcgtagccgttcatcagacgccaacgcacgtaatcgttgacctcgaacggcagggtcacgtcgccgcaagtgacagtgcgggtctccagcgagacagtcatctcacgaccaggctcttcctccagtagcttccacaggagttcgacggactcctgcggcataatcgcggccagcacgccgttcttggcggtgttgccgtagaagatgtcggcgaagctcggcgcgatgaccacgcggaaaccgtaatcgtgcagcgcccacacggcgtgctcgcgggaggagccgatgccgaattcggggccggcgaccagaatctggcccttaccggcgtattccggcttgttgagcacgaagttcgggtctcggcgccatgcgtagaacagggcgtcatcgaagccggacttggtcacgcgcttcaagaacacagcgggaatgatctggtcggtatcgacgttggagcggcgcagcggcacgcccacgccggtcagtgtggtgagtttttccataacaattttcctttcggggatctctcccccagtcagtcttcgactgacagcccctcgtcagagggggctcacgtgtattgactcagagatcggcgggagacgagattgtgccgcggatggcggtggcggcggctacggccggcgacgccagatgcgtgcgcgagcccttgccttggcggccctcgaagttacggttcgaagtggaaatcgagcgctcgttcggcaccagcttgtccgggttcatgcccaggcacatcgagcagccggcgttacgccattcggcgccaaagtccttgaacaccttatcgaggccttccttctccgcctgcaaacgcacgcgggaggaggccggcaccaccagcacgcggtggatgttctcggccttgcggtggcccttcataatcgcggcggcctggcgcaaatcgtcgatacgaccgttggtgcacgaaccaatgaacacggtgtccacggcgatgtccttgatcggcatgcctggcttcaaacccatgtatgtaatcgcacgttcggcggcggcgcgcttggtggcgtcggcgatcttgcccggctccggcacggaggcggtgatcggcagaccttggccggggttggtgccccacgtcacatatggaccgagcttggtggcgtcaatatccaccaccttgtcgaatacggcatcgtcatcggtcttcagcgtcttccagtacgccacggcctgatcccacagctcgccttccggcgcgtgcggacggcccttcaggtactcgaacgtggtctcgtccggcgcgatcatgccggcacgcgcaccggcctcgatggacatgttgcacacggtcatgcgctcgtccatggtgaggttgcgaatcgcctcaccacggtattcgatcacgtaaccctggccgccgccggtgccgatcttggcgatgatcgccagaatgatgtccttggccgtcgcgtccgcgggcagcttgccgttgacgttgacggccatggtcttgaacggcttcagagacagcgtctgtgtggccatcacgtgttcgacttcggaagtgccgatgccgaacgccagcgcgccgaacgcgccgtgcgtcgacgtatgcgaatcaccgcacacgatggtcatgcccggctgggtcaggcccagaatcggggcgaacgcgtggacgatgccctgatcggcgtcgcccagcgggtgcaggcgcacgccgaactccttgcagttcttctccaaagtcgtcaactgcaacgcgctcgtctcatccgggttcgggcgatcgatatcaacggtcggcgtgttgtgatcctcggtggcaatgagctgatccacgtgacgcggcttgcggccggccaagcgcaggccctcaaacgcctgcgggctggtgacctcatgcatgagcatcagatcgatgtacagcaaatcaggggctccgtcgctgcccttgcgcaccagatgatcggcccagaccttctcggccagtgtcgttcccatagtgattcctccaaaaaattccgcgcgaggtattgtgttcgcgccttgttcgtggtattagcctatgtgcttgcgatgggcccggccatgagcatgccggatattgagatacggtcaaatgatggcctcaatatgactcggatacgactcgaacatgacctagtcatgactcggttccgctccagacatgtctcttcggcatccacgaacgccctttcaacttcatggccaccctgtgagacacttccccaatttgctatttcactatgtgagatggcataatcgcccttattatgactgattcccaagaagagccattgaacaacagcttgaccgagtccgagccggttgaagacaccaccgccaaggacgatggggaaatccattccggcgttggcgtccttgataaaactgtaaagattcttgacgcactggaatccggcccgtctacgctgggccagcttgtggccgccaccggtctcgctcgaccgaccgcacatcgtttggctattgcactggaacgccaccgtttcgtactgcgcgaccagcatggccgattcgtactcggctcccgtttcgccgaacttgccgccgcagcaggcgaggatcgtctgctgaccgccgccggcccgatcctgcagaccctgctcgatcgcactggcgagtctgcgcagatttaccgccgccaaggcgatcagcgcgtgtgcatcgccgctgtggaacgcacctccggcctacgtgattccattccggtgggtgccatgctgtcgatggaagccggttccgccgcccagattcttctggcttgggaggattccgaccgtctgcaccagggattgcgccacgccaagttcaccgccaccaagctggccgccgtacgcaagcgcggctggtccgagtccgtgaacgaacgcgaagagggcgtgtgctcgatttccgccccgatccgcaacgcctccggccaggtcatcgccgccatctcgatttccggcccgaccggccgcatgggtgccgcccccggacgccgctatgcgccgctggtgatggccgccggcaagtacctcaccgaggcactggtcaaagccgttcgctgaaacataccagtcaatccaaccgatagcccaaccggcagaaatcccgcgtcacaacgaaagagacgcgggatttctgccactaatcgtccaacacagcggaaggccaccgaaacctcgaatacttcgcgccgctttccgcctctatcaggaacagttacctgaataaaccgggttacctgaataaaccggacagttgactccatagcgacggcttgcgcagcaaatcatcgccctcaccctcgccaggcgtggtctggttcaccgcataggtgtaggcgcgtttggaactgggcttgcccaccagttcgccaaactccagcaattgcgtacgcggctcgtaagggtgacggatatcaaattcgatcaatcgcgtggcacgtttggccggagccggtccgtacgtattgaatccgcaggttggcgtagcgataagcaacagaccctcatgttcgccgacgaaaccgttgcgatgatcatgaccagctacgacgccgaaatacccctcgcgcagcaattcgaattcgtctgacgtatcagggcaggatatgccttctcccagatatccgccgggctgggtttgcaattcgtccagcacgtagtaggtatcggcgtgagaacgatagccctgcatggcaaacgccgcgttggccgccactggcttcagcacgttgtaatactcgggcatcggcatgtgctggaacaccattgatttcgcaccgatacggtcgggcacggcgttcaggaaggcgagcgctgcgggcgatggtgcgccgaagccgccgccatgcacgtaatcgccggagtcaagaatgaccagacccagcacattgcgcgtatggtcaacgtccataaccggcagcgcgaaggtgcctggttcaccggaaccaatggcaccagacggcgtctgcacagcgccacccgctccacaggtgtatgcaatctggttcggcaaggtctcactcggcggattgacacaaccggggaactcacgatagataccgtccagttccacattgcttagcccgcattggaaatcatggttgccatacgtcacagcccacggaatgccgcgcgccgccaacggctcagtgaactggccaatggccttgcgcaccagcgctcgggtatggttcagcgcggattcggcaataggttcgtcacaccagcgacgtttacggaatgaatcggcgaacgccggatcgtagccggcgatctggttgccggagaaaatcaccagatcaggccgtgtggcatcaaggctggcctcaatcagggtgatggtgtctttggagactttcggcccatcctgaatgtcggcaatctgcagcacgcggaacttgccggaatagtggaattgcagtcgtccgagacgcgcagagatagagaccggacggccgtcttcggcatcggccggcttgatacgaggtttcgacgacatcccctctggcgtacgctgtgtttccgtcatgccctccactgtacacacaaacgaaaaggcccgccggagcgggccttttctacaagttcaactactggaacagaatctctgcacaacatcatcgttgtaacggtaagtctttccaatgcccgtccaacgtaacagtcctcgtgaccatacactatttgtgggctctgctctgttcagttgttcttgtacctcataatctattcatcactcccgtttctcgcaacctgcagagagtcgttgtgcgttttttatcacaactgttcaatcgcactttctggctatcggaaaacgagctgaaccgttcacatcgaacccgtccgatgttcgatttcgttcgtttcaccgccgctcacggcgtgtcgcgagcgacgctagcacactcaaaaccaaccaacaccgaactaacatgaacacccgttgaattctggcgcgttcagtcgttttccggccacgccaaagcttacgatataagctatggcacagatatttgacgcaccctcgaaggcaattctgcgcagccaaatcgcagagcatattgccgaaaacgacaacaacgaccgccgcgtcgatcaggaaggcgaggcaccgctgcccaaggaccgtttcttcgaccgcgagctcagctggctcaagttcaaccagcgcgtgctcgaatgtgcggagaacgaagacatgcccctgctcgagcgcgccaacttcgccgcgatcttcgcctcgaaccttgacgagttcttcatggtccgcgtcgccggcctgaagcgccgtatcgactcgggcatcgccgtgccgtctgccgccggcctgagcccgcgtcagcagctgcgcgcgatcagcgagaccgcacaccgtctgcaagacgagcacgcacattacgcgatcgacaccattctgccggaattggagaaggagcgcatcgtcctgctgacgtgggacaagctcacctcctccgagcaggagcgtctctcgcgctactaccgccagcaggtgttcccggtcctgacgccgctcgccgtggatccggcccacccgttcccctacatttccggcggttccatcaacctggccgtgattgtggagaacccggcctccggcaagtcgcacttcgcccgtgtcaagatcccgggcaacctgccgcgcctggtgccggtggacgacatgaccgacgaggagtccaaggacgagcgttacggcttcatcgccatggaaaagctcatcgccgcgcatctggaatccctgttcccgggcatgatcatcaaggaagcccgctccttccgcgtgactcgtaacgaggacatcgacgtggaagaggatgacgccgagaacctgctcaacgccatggagaaggagctgctgcgccgccgcttcggaccgccgatccgtctggagatcacggacaccactagcccgttcctctcccagctgctcgccgaccagctcggcgtgagccaggacgaggtataccgtctgcccagcccgctggacctgaccgtgctctttgagctcggcagcgtggaccgcccggacctgaagaaccgtccgttcgtgccgaccacgaaccgtcagatcgccgaggtcgagtcctcccgtgcgcaggacattttcgccgccatccgcgagcgcgacatcctgctgcatcacccctatgactccttctccacttccgtgcaggccttccttgcgcaggccgccgcggacccgaaggtgctggccatcaagcagaccctgtaccgcaccagctccaactcgccgatcatcgacgccctgatcgacgccgctcatgccggcaagcaggtgctggctttggtggaaatcaaggctcgtttcgacgaggacgccaacatcgcgtgggcccgcaagctcgaacgcgccggcgtgcacgtggtgtacggcatcgtgggcttgaagacccactgcaagctcatcgaggtcgtgcgtcaggaagcggacggtctacgccgctactgccacgtaggcaccggtaactacaacccgaagaccgcgcgactgtacaccgatctgggtctgctgacctgcgacccggtggtcggccaggatctgactcgtctgttcaaccagctctccggttacgcgccaaagtccagcttccaccgtctgctggtggccccgcgcaccgtgcgcaccggtctaatccagcgcatccgccgcgaggaggacgccgcccgcgccggcaaggaggcctggatcaagatcaaggtcaactccatcgtggacgagaagaccatcgacgccttgtaccgtgcctctcaggccggcgtgaagatcgacatcgtcgaacgcggcatctgcgctctgaagcccggcgttcccggcctgtccgagaacatccgcgtacgttcgattctcggccgcttcctggagcactcccgcatctacgccttctgcaacgcggacggcccgcagatcggcgagggtccggcttccggcccggaggtctacatcggttcggctgacctcatgcaccgtaaccttgaccgccgtgtggaggctctggtgcgtgtcaccgccccggagcaggtcgacgggctcatcaagtacgtggacctgcagatggccgactccaccatgagctggcacatgcagcccgacggcacgtatgtgctgcacaccaaggacgacgagggccgcccgctggtcgacagtcaggaatatctgattcgcaagcatcagcgccgccccaattcgcacaactgatttcattcgatgctccctgtcagcacgagctgactgagggtggttacgatgcccggctcctctttcgagaggatgccgggcatcgttgttcagcgcgcaaaaactacgtagcagcggtccaacgtgacctacaatacaagagatgggtacgaacagtatgagacgaatcgtggaagccgccggcggtattctgtaccggtggaaggatgatgccgagccgacgcaggcatcgtctccatcagcgaaatccaatattgccaccgatggcaccatcatcgcgaataccgcggattctgacggcgagaccacggcagcacacggcgcatcggacgcggctcccacaccggacccggcgcaggccgacagcccggccgcggcggacaacgtactcaaccgcatcgaactgtgcgtcgtgcatcgcccgaaatacgacgactggagctggccgaaaggcaaggtcgacccgaacgaatcgcaccggcatgccgccgtacgcgagatcggcgaggaatcgggcctgtccgtggaacttggcccctatctgggcgacatcgagtacccgctgtccgaagaaggcagcaaacagcgccataccaaggatcggtcggcggataccaagcatatccagttctggatggccacgccgatcagcgccatcgacaacctgcggcgtacccatgcgtttggcccggtgcatcgggcggacatcggcgaaatcgacgaagttttgtggctgacgccggccgaggcccgcaagaagctcagccattccaccgataaggacatcctcgcgctattcgttgatcgggtgcaggagggcgcgcttgacgccgtgccggtgattatcgtgcgccacggcaaagcggaagcgcgcaagctgtggaagggttcggacgcgaaccgtccgatcacgccgcgcggcgcggctgcggcatacgcgctgaaccgcgagctggcgtgtttcaatccgacccgactggccacgtcgccttgggtgcgctgccaggagacgttggagatgttcgcgtggcagaccggacgagacatggttcatctcgatccgctcaccgaagatgcatacgccgctgcgccggacaccgcatgggagtgtctactcagcgaaatcgagttcgcacttgagcgccgtcagcccatagcgatatgcatgcaccggccggtgattggtggtatgttcggacacctgcgcagcatgtgcgttgcgccgtctctgagcaaacgcctgatcgccaagacaccgttcatgccgaccggcacggcggtggcgctgttcgtcactccgacgcctcatggtcccaaaatcatcgatattcagaaggttcaaccgcttgtctactagacccgcatttcctgattcatccaactcctcggccgctgccgctgcagctcatgccgcgcacaatggtgccgccggcagtctgggcccgggcttcggctcgttgcgtgcggccggagcggcattcggacctgctcgcatgggttcttcacgcccctcgcgcccggctcagctcgacccggctgtggccgatggattggccggtggcatggacccgcaggcgttgagcgagatgagtcatctgtctgctgccgcattgctggatcgtgtgcgccatagcgaagacccggcggttgttgagcgggtgctcacgttggtggagacggtcggcgtggatgaaatcgccgaactatggagcgataccgagccggattcgctgcctggtgtgctgtggcgactgtatatgttgcgtacgtggatgcgatcgaatcgcgactcaatcgcgcatctgtggcgcttgggtgagccggtggccactaccgcctccgccatcgccggcgtggatcaggctcccagtgaagatgacatcgtgcgattggccgattcgattctctccggtgcttttgtgggcgattttgccgtggcgcttgagcgtgcggcggcgtttaccgatgtggtggcgttgggcttgcgcgtggaggcgcggcgcatggtgacctgggccgaggccaacggcggcttctcctcggatgccgatgagaaggccgtgcgcaccaaagccgcccgccttatgcacaccgccggcagcctcatggccaccgccaaggatttccaacacggtgccaacctctggcgtcgcggacggttggagtaaccccgctccaggctccctctgatgagggagctgtcacgggcgatgcccatgactgagggagaaacccaccaaccgcaccccaacaatcagctaccagccaacaccacacctcccccggcgcggcgagccccatcgcaagctatactgagtatccgcgtcggaccgtgcttaagccccgggctccattttttgccgccgcgagcggcccttgcgccgacaggcgctttcgcggttcggcgcttcttttcttttaccagattcacgccccgagcgttgcgatgggcacgaccagtatgccgtcattgcggcgataggccttcccacctcggccggtaaggaacatcatgaattcggggtctcggacctgagccatgggattgccgcagattttgttgcggaaggatttgagcttatccgcattgtcatcgttcaccttaaggtcactgagttttatttcgatggcaccccacctgccgtcagacaactcgataatgacatcaacttcaagccccttgtcatcgcggtaatacgcaatgcgattcccggcacccggcatagccgacagatatacattcaaatcacgaatgcacagcgtttcaaacagatcgccgagcgtctgtgtatcgcgcatcagagtattcggcgcggcacctaaaaccgcagcaggcaacgaaggatccacgaaatatcgcttgggcttggttcgcacacgactctttgcgcggagtggcggttcccaaccctccaaatccgtcagaaggtacaagtccttgaacatttccaaatagctcttcaccgtctgcgtatccggctcacgccgctcatcgccatatgccatatccgcagccagcgtcgcatattttggtgcctgcgagatgttcacggcaagagctcgcatcaaagctcgtgcagtttcaggattcttcttcatcttcggcacgctgatatccagcacacttgcgatatattcgcccgggatttccaaggcgaattcatcgtctagctcaagattcgcgggccatccgccacggcaacaccatctggcgatgtcttcgatactcgtattgcattcggcaggctcgaatttcccctcgaacaaatcggataggctgaccgcgcccgtggattctccggattcagccaagctcatgggccacatgcgcagacgagcaatgcgaccagtgccgctgtgatgaatggcgtcacgatcctttggaatagccgaacctgtaagaatcagctgccccttgcggttcgcattgtcatctatatggcgacgagcggcatcccaaatttgcggtacatcttgccattcgtccaccagatggggctcctcccccatcagcaccaatgcaggatcggtttgggcggccgcgaaaactgccacatcatccagacgatcaacgcttcgagaccgggagagcgcggtccatgtcttgccgcaccatttcggcccaacgatttccactgcaccgaacgccttgagcagtttacttaatctgctatctaccacgcgtgaacgataatcaggcctggtcaaggtaccatcgcgaccactcaaatcgttcatattgcagcctttcccagttctatcgttctaacaatatagattttacaccagtttcattcccgattttacacctatctcattcccggttttacaccagtttcattccctgttttacaccgtgttgttttttacgctttaccctctcagaggtatcagaggcagatctcggcacggacagggcattgtcctgctgcaactggcctatcgcagcaaaaagtcgaatcacccacaaatccaatccgataagcaagccgcgccattaccaattcggcaggtcggcaaacttggactaggctgggaatcatggaactccatgttttgaatcatccgctggtcgagcacaagctcaccgtgctgcgcgacaagaacaccccctcctccaccttccgcgagctcgtctccgaactcgtgatgcttgaggcctacgaggccacccgcaacctgtccgtggtggccgcgccgatcgagacgccggtcgccccgatgaccggcaagaagctcgcctccccgcgcccgatcatcgtgccggtgctgcgcgctggcttgggcatgctcgacggcatgacccgcctgattccgactgctgaagtcggcttcctgggcatgaagcgcgacgaggagcaccccacccagcaggtgacgtacgcgaaccgtctgcccgaggacctgtccggccgccagtgcttcctcatcgacccgatgctcgccaccggcggaacgctggtcgccgccacgcactacctggccgagcgcggcgccaaggacgtgaccgcgatcaacatcatcgcggcccccgaaggcatcaagtacgtcgaggagcacatcgacccgtccatcgacttcaaggtcgtggtgtgcgcggtcgacgaacgtcttaacgacaagtgctacatcgtgccgggactcggcgacgccggtgaccgtctctatggcgtaattgactgatttccctggctcccctccccgaggggagccaacataacggaacatctatgcaaatcgacattattgcgccggggcgcgtgaaggagcgttaccttcgcgacgccattgacgagtattccaagcgactttcgcgctactgcaagctcaacatcattgaagtggcagatgagaaaacgcctgaccatgcctccgaaggcgttgaccgacagatcaaggccagagaaggcgaacgcatcgccaagcatctgaaggacggcgcgtttgttattgcccttgccatcaatggcaagcagctgtccagtgaagaattggccgccaaaatcaacgaccttggattgcgtggcaccagccatattcagctggtcatcggcggttcaatcggccttgacgacgcgattctgcgtcgtgctgattttctgctgagtttctcgaagatgacgttcccgcatcagcttatgcgcgtgattctgctggagcagatctatcgcgcttataaaatcaacgctggcgagccgtatcacaagtaaaacgccatacctcatggggcgggaaatcccccatggggcggtaattgccccatgaggcggcaaaatcctcatggggcggtatgccaaaatggcttaattccgcggtttcacatattcttcaaaccgccccatgggcaagttaccgcccgatgagcctgtaaccaccccatgggcgcatcaataacgccctcaacctcacactgcgtcggggacgaacgcttcgaagatgtggcggtcgaagtagggggcgcactgggcgagttcatcgctgctgcgcacggtccatgaaaccggcatcgcacccatcgaacgagcgagcttgacttgcggcgaagcgccaccggtccagtcataagccacgaaatcaggacgagacagccagtcgaacgccagtaagccggcggcccattcagccgcaccattcttgctcagcttcgccggccagctcagctgaccgcggcacacctcagggtgatgctccttgtaccaattcaccgcgcccgggtggaaggattcgatcacgtacgggccgtcatacgcctcaagcaaggcgtggcccttttccatgagctcttcgctacgctcatcccaagccctgttgttgctgaacttgtattccacaatcagcggagcccggccggccaccacgtccagcacatcggagaacagcggcacatgctggtagtaccccttcggcgcggcggacggcgtgaccaccagcggcgggttcgcgtcggcacccggcaacggttcggccttcaaatcgcctgactcgccgttcgggaagagcggaatacgggcgagttcgtcgtaagtcaggtcttcgatgcggcgcggatcgccggccacgcgcaacaaatcggcgtcatggaccacgaccacttggccgtcgagcgtaagctgcacgtcgagttcgatgccatagccagcctcgcaggcggcggcgaacgcggccagcgagttttcgggagcaatcggaccggtcatatccgcactgccgtagccggccttgacagccatgcgacgggcaagcgacacataatcatcgttttcggcgatggatcgctcagtggtatcggcttgggcgctaaccggattatccccaccataatcagcgatatcggtatagccgaccaaaccagaacccgcatcatgcaagccacgatgggcataccatacctccggaatggagggcacgaaattacgacgcttgtcattgaacgtgcgcggggccacggcccacacggcagcaccggcggcggccacgcctgccagcgccacgtttctccagagcttcgacgacattggaatccttcctgttgggctgcctctagcctaacgcttctgccagccattgtggagtggttggatcatccggtttcagcgcgcggtccaggtggttggcgcgcagtggctcccagctgaaatctgccagcagatcggcgggtttgcaaggaattggagtgggttgcagacgcagcagccaggcgcagtatccgatgatttgctcgggggttacgttgcgggcgcgcaaggctcccatatccagcgaacgttcgcgcttagctaaacgccggccggccgcattgtcgataagcggcaggtgcgcatactcggggtgctcggcgagaggcttttccgtgttgccgcattccggctcaaagccgccagccaacagacactggcgaatccacatttgcagcgcggtggagcgcagcagatcacggccgcgcacgatatcatcaacacccatatcgaggtcatccacgaccacgaccagttgatagccgaacagtccatcggctcggcgaatcacggaatcgcctacctcgcgggccaaatcgtagtgctgtggactatagacacggtcgttaaagcatgcgacaccatcaacgattccggcatcgccctgctgttccggcggcacggctcccgacagcgcagcggaatcgtcaggcactgtacgttgcttttctcccgctgccgattccggcatggcgatacggatggaatgctggtcgccgcgaaccaaacgggcacggacctcgtcgggatggtcgtgcagcaggcggcggcacgtgccggggtacaccatgaagccgtcgccctcgttgggggccgaggcggcgcgaatgtcggcacgcgagcagaaacaggggtacagcacaccttgcgagcgcaggcattcgagagcgtattcgtatcgttcagtgcgctgggattggaacatcggttcgccatcccagtcgaggccgagccaatgcaggtcatccatcatgagctggtccgcaccggcgaccacacgcggcttgtccacgtcctcgatacgcatcagcatgcggtcgccacgcgagcgggccgaaagccatgcacccaacatggcgtacacgttgccgatatgcatgcgccccgacggcgtcggcgcgaatcgtccagtcactggccctcctcgtatgaagttcagcaccatggtagcgaaaaggctctcctcctcagaggagagccaatatagtgaagctcgccagcccgaactcccctcagtcagcttcgctgacagctttgctcagagaggggagccagtgattgtcacttgtcttcggtgacgttgtccacgctcacgtccggattgtcggagacaatctggtcgctcgcccaagcggagagctccagatgttcgccgccggtctggtcgaccagcacggtgtcgccatcgtggaccttgccggccagcagcatacgggccagctggtcgcccacttcggtctgtaccaggcggcgcagcggacgagcgccataagccgggtcgtaaccggtgttggccagccattcgcgagccgagtcggtgacgtccagcgtgatgcggcgatcggtcagacgctgggccacgccagccacctggatatccacgatgccgccaagctcctcacgcgtgagcgggtggaacatgacgatgtcgtccagacggttcaggaactccggcttgaagttcatgtggacggcgtccatcacggccttctttttggcgtcggcgtccatgtcctcgttcacgaggaactgcgagccgaggttggaggtcatgatcaggatcgtgttcttgaagtccacggtcctgccctggccatcggtcaggcggccatcgtcgagcacctgcagcaacacgtcgaagatctccggattggccttctcgacctcgtcgaacagcaccacggaatacgggcggcggcgcacggcctcggtcagctggccgccctgctcgtagcccacgtagcccggagccgcaccgatcaggcgcgagactgaagccttctccatgtattcggacatgtcgatgcggaccatggccttctcgtcgtcgaacaggaagtcggcgagcgccttggccagttcggtcttgcccacaccggtgggaccgaggaacaggaacgatccggtcggacggttcgggtcggagatgccggcacgcgaacggcgcaccgcgtcggacacggcggcgatggcttccttctggccgatcacacgcttgcccaggtagtcctccatatgcagcagcttctcgttctcgccctgcatcaggcggccaacgggaatgccggtccagtcggagacgatctcggccaccgagtcggcgtccacacggtccgggaccatcggctcatcggccgggttggccgcgccggcatcggcagattcggcatccgcgctttccgcggcggcgagttccttctgaatagccggaatctctccgtacagaatcttcgaggcctcagccagatttccctcacgggtgaacttgtccgcctgcacacgcaggtcatcgagcttggcacgcaggtcaccgaccttgttgtggccggcctgctccgcatcccaacgcgccttgaggccgctgagcttctcacgggtgtccgcgagttcggcttgcagcttgcccagacgctccttggatgcaggatcctcagccttcttgagctgcatttcctccatttcaagacgggtcaccttgcgctgcagttcatcgatctcctcaggcgaggagtcgagctccatacgcaggtgggcagccgcctcatcgaccaggtcgatggccttgtccggcagctgacggcctgagatgtaccggttcgagagggtcgcggcggcgaccagcgcgtcatcgccgatcgtcaccttgtggtgcgcctcgtaacgctgcttcaggccacgcaggatggcgatggtgtcttccacgctcggctcgcccacgaacacctgttggaaacggcgttccaatgccggatccttttcgatgttctcgcggtactcgtccagcgtggtcgcgccgatcaggcgcagctcgccacgggccagcataggcttcagcatattgccggcgtccatcgatccttcggccgcacccgcgccgacgatggtgtgaatctcgtcgatgaaggtgatgatctggccgtccgcgttcttgatttcgttgaggacgctcttcaggcgctcctcgaactcgccacggtacttcgagccggccaccatggagcctaggtcaagggagatgagcttcttgccttgcagggtggtgggcacgtcgcccgccacgatacgctgggccaggccttccacgacggcggtcttgccgacgccgggctcgccgatcagcaccgggttgttcttggtacgacgggagaggatctgaatcacgcggcggatttcctgatcacggccgatcaccggatcgagcttgccttccttggcggcggccgtcaggtcggtggagtacttctccagggccttgtacgagccttccgcgtccgggctggtgaccttcgcgccgccacgcacgccgggtacggccttgcgcagggaggctgcggtgacgccgttcttctccaggatttcggccgactggttcggcttgctggccgcgatgccgataagcaggtgctcggtggagacgtattcgtcgcccatctgctgcatttccttctcagcctgggcgatggcggcggtcagctggcggctggcttgcggctgcgaagtgctggagccggatgcgctcggcagtgcgaccaaagcgttacgcacggcggcgccgatggcctgtgggtctccgcccgcggccttgatgagggagcgcaccacgccgttttcctgacgcagcaacgcatccatgacgtgcagggtctcaacctgcgcgtttcctgcggcggacgcactctgaatcgcgtcgccgacggcctcctgggccatagtggtgaacttctgttccatatcgtattcctccatatcatgcggcccgcgcggagcggctcgcgggcttcgaaagccccgcaagcgtcaccgcagaccgcaacttgtcgttgtctgatatggtcaaccgacctggaacccattctattcccaaaacttgagtgcatatgactcaagttttggattttggtggggagggtgactagtagccccctctgatgagggagctcacatctatttcaggaggccgacggcagcttcggcggcggataggatttcgccggagagaatcgcctcggcaacgccctcaatctgcggggtggtccaggtgtcgcgtacgtcggggccgatttcgttggcgtacttgcgcaccacgtggtatacggcggcgcccgccgcacccggacggtacggcttgcggaagtcgaaggagcggcaggagcacagcagttccacggccagcacgcgcgcgaaggccggaatcgatcggcgcagcttgcgggcggcggcccaacccatcgacacgtgatcttcctgcatggcggagcttggaatcgaatcgaccgaggcaggcacggcgttacgcttcatttcggagacgatgccggcagcggtgtattgggcgatcatgaaaccggagtccacgcccgggtcaccagccaggaacgccggcaggccgcggttgcgcgccacgtcaaggaagcggtcggtacgacgctcggagatagaggctacgtcggcggtcggaatcgccaggaaatcgagcacataggccagcggcgcgccatggaagttgccgttggactccacacggccgtccagcgtgacgcacgggttatcgatggcggaggcgagttccacgcccgccacggaggccgcgtattccacggtgtcgcgggcggcgccgtgcacctgcggggtgcagcgcagcgagtaggcgtcctgcacacgcacggtggagcccgggcggccggcctcaatcagaccagagtccttgagcatgcgggcgatgttcgcagcggaatcgccttggccgcgatgcgggcgcagcgcctgcaagtcggcggcgaatacgcggtcgttgccgagcatgccttccacgctcatcgcggcggcgacatccgcggtcttgagcagcaggcgcagatcggtgatggccatacacaacatgccgagcatgccgtcggtgccgttgaccagcgccagtccttccttctctttcaaatcgacgggcgtgatgccggccgcacgcagcgcttcgccgccgccgatcttgaggccgtcagcgttgcgggcctcgccttcacccatcgccaccaaagcacaggctgcgagcggcgccagatcaccggagcatccgagtgaaccgtattcgtagaccaccggggtgatgccggcgttcagcatatcggcgtagacctgcgcggtttccgggcgcacaccggtgcgtccggtgcacagggtgctcaggcgcagcaccagcaggccgcgcaccacctcacgctccacttccggtccggcaccggcggcatgcgagcgaatcagacttttctgcagttgcgcgcgctgttccttggggatggaagtggaggcgagcgcgccgaatccggtggagatgccgtaatgcggcacggtgtcgtcggccaaatgatcgataaccgcgcgactcagcgccatctcatgcttcgattcgtccgaaatcgccactttggcgccgccgcgcgctacggcgataacgtcctcgatgctcagcgctccaacacctacggtgaccgtctgctctgccatgctcatacctttctatatatgtgccgcattccgcatatacgacatatacggcatatgcggcacatgcttcgccggggatccgcgactgcccgcattcgctcaccgcacctgcccatcaacagcaggcgacgcaaacgcaaccaatcgctccccgagtaatcaaaccttggccatttcacctcagtcggatgcccgctataagccacttcgtccatcttgtgtctgaaatctcagacatgtaaggtgatggaaatatgagccatgcctcgcagcaatacgccttcaccgagccacgtaccgtcaagcgggcgcaggtgaagccatcagaacgggaacatcagacatcatcatccgcgccacgtgtctcgctggctccggcggccgaccgtacgctcgacatcctcgagttcatcgcgagcaatggtcagacgcaagccgccacgctcgctcgcgaactcggcattccgcgctccacggtgtaccaattgttggagattttggagcgtcacggactggtcacccgccttgccgagcagcgcgcgtacggcatcggactcaagactttcgagctgggatcggcctattctcgccaacatcgtgtatcgcaggtcgcgcatccggtgttggcgcgtcttgttgacgagaccggcgaaaacggacatctggccgtgctgcacggcaacgaaatcatttatgtgattgaggagcgcgccgcgcatcgcccgccgctagtgtcaggcgtgggcgtgcgcctacccagtcacctgaccgccaccgggcgggccattctgtccgcactcccccgcaatcaggtccgcgcgctatatcccaatcgtcaggcgttcaccgaccgcaccggcatcggccccaaatcgcccaaggagctggaggcaacgctcgccgaaacccaacgcaccggttttgccgaggaacacggagacgtgacgcccggctttgattcatacgccgtcgctgtgcgcgactacaacgactttcccatcgccgggctggctctcactttcgtgagcggatcgctgcgccccgaacaggagcggtcgcttaagaccaagctgcggcttgccggcacggaactgtcccggcgtctcggcgcggtcggcagtttgacatgaggattcgcgagatcatcgtgctgggctccttcgccccgatcacgattttctcaactaagttcaccgattcgctgaccggcaacgccaaactcgccggcttctcgctgacagtgacggccatcatcagcctggtggtgatgaccgccctgcacgcacttctgccgggagcgtaaggcgcgttcttggttccctcagtcagcttctccgcctggacggttcccctcagagaggggagccagaacgagtcacgcccgaacgattacgttgcgcagatcaccgatgccttcgacgtgcacgatggtctcgtcgcctgggtcgaggtggccggaggcgttcggggtgccggtcatgatgacgtcgccaggcagcagcgtggagaacgacgaaatggcggcaatctgctcggggatgccgtgaatcaggttcgcggtggtgccagacgccatcggcacatcctcgccgttcagcgtgaaggaaatcttggcgtccttccagtcgaggtcgtcacgcatcacgatccacgggccaagcggacaggaggtatcgaagcccttggcgcgcgtccacgtggggtcgatgccctgcagatcgcgcaacgtcacatcattgacgcaggtgaagccgagcacgtaatccatcgcgttctcgacggtcacgttcttggcgatacggcccatcaccacggccacttccggctcgaagttcatgtccttggagcaggccgggtacacaatcgggtcgtcggggccgattaccgaggtggacggcttggtgaagatcaccatgtcttccggcgcgtgggcgatttcggagtggccggcctcgtgcatgaactgggcgtgggcctcatagttcttggccagaccgtaaaccttggaggggatgaccggggagagcagacggatgccatcgccgtcgaccgggtaacgagtgccggtgggcttgacctggtcgccggccagcggatggccgtccagttcgatgaggtagtccttgccgtccgtttcgtccttctgcacgaaggcgtagcgcggcgaatcattcaaagaaaaacgtgcgagtctcatgcctgtaagcctactccttggcggttccttccgcagaagcatccgtccaaggagcaagcagaccggccttcaatcgaccaaaacgcacgttcgctgggattgctacttttcggtccaggttttgtcatacagcgactggccgctttgcgtgtgcatgatgacgcgcaatgatgccttgccgctggaggtcttgcacatcgagcccagcagattcgcggtggattgataggtgctgtccatagcatccagtgaggaagcggcggtatcgcctagcgaggcatagctgtcgtcgagcacgtactcgtacaccaaggtgtcaccgtcgacacggtagttgaaggtgatgccggtgtctgcaaacgtatccgcttcggattcaatggagtccttgaattccaaagagtcgacgaaatcctgaatcgaatcgtacagcccataatcgccgtcggttagatcgtcatgggtttcgcccaacgtgtcgtccagcacatcgtcaagattatcttgagctttgctcttatcgctgctatcaccgttgcccgaagaggactgactatagaaggaatcggttttcgcctcatctatagccttgctggcatacgaggcaccgccgacgatcagcgcgatgaccagtattacctgtatcaccatgcccgccgcactgatgatgatgccggcgatggccaagcccttgcccttgccgccctgtttcttaatctggttgaggcccacgatgctcaggattagaccgaggagtgagacaaggaacgagcagataaaaccggcaatagccaggccgttgtacttctggttcgcttcaggcggcacactgccgtaagaaccagaccatcccggctggccgttcggttggccgccttgcatatacgggttatagggcgtttgcggaggcacggccccgccgcccggatataccggagcactgacgctgccgtagaccggaggaaccgatccgcctgccggagccgcccccggatagggcgaattgggtgctgccggtgcgggcgcaggcgcgggcgctgccggtgcgggcgcgggcgcagcggcaggagtcactggtggcaaagcctgcgtaggcggtaccggctgattggccggcgcaaaaggctgggtgggctgctcggcaggtgtaaacgcctgcgtaggctgttcaacaggagtgaacgcttgagtgggctgctcgcccgctgcgattgcttgggtcggagcattgttggcggcggttcccgtttccgccgtcatcgcatttaacggctcagtcggattggcgtcagcttgctgccacggcacctggccgttcggattgacattcggatcagtcatgacatgcactccttcaactgcatcgcaccccacttgcgagatgcgcccctcgtcttacgcgccacattgtgcgttacagacaactgtactcctcgtggcgagccttaagcaccccaggaaatttggctccccgtcatcgacgggtagtgcccgagtttttgcgcactttggtcttcgcccgtccccgtggcgatgatcagttcgctgactgtacgttctcaccgagccttgacatgtcgaggtagcgtcgcgtcgaccactcgctggaagttacgtagcggactctcgcgcagatgagcatcaacgcgctgcgcccgtccgggaagctgccgaccacgcgcgtgcgccggcggatctcgcggttcagccgttcgatcatgttgttcgttcggatgcggcggcgatgctcgcgggggtagtcgtcgagcaggtaggtcgtggtctcgccgatgccctccctgaggcatttggcggcctccctcagtttccgcgcctccatgtccttggcgacggattccgccttctccagcgccttgtccctcgattccatggagaatatggccttcagcgcgtcggcggcccagtccctgtttttggggttgaccttggcgaggatgttgcgttcgaagtggaccatgcaccgctggtagcgggcgccgggcagcaattcgttcacagccgccaccagtccggcgcaccggtcgcccgtcaccagcctcacgcccttgaggccgcgcgcgagcatgcctttgatgaattcgcgccagctttccgagtcctccttcatgccctcggccaccgaaagcacctcgcgccgcccgtccataccgacgccgacggccaccaggatgctcacgttctccacggacccgccccagcaccttttgtgccacacgccgtccatgaacaggtacgggtaatcctgttcgaggggcctgccacgccattcgtcgatgtcggcgtataccttcttgagcttgtcgctcagggtctgcgagggcatgcggtcgccccacagcagctggctgacatcgtcgacctgccgggtggagacgccggccaaatacatgtcgatcagcgcctcctcgacgctctcctcgcgccgacggtatcgttcgatcaccgccgactcgaacaccgcccctttcagtttcggcaccttgagactcatcttgccggccttgacggtcaggtcgcgctcgtagtggccggcccggtaggccttccgctccccgctgcgctcgtagcgcgcggcgccggtgatctcgtcggcctccgcgtcgagcatcgcgttcagggtctcctcgacgcttttgcggaccatccggtccagggtggtctccaacatggcctggtcgacctgtagaatctgctgtgacatggcttcgtgccctcgtttccaatcgcggtttgttttgtttggcgacagaaaatcgtacacaggacacgggccatgtctctatctcaggccctcaaccaatttgcgcaaaatctcgggcgttatccatcgacgcgacgtggcactttaccaattcagtcaaataattgcttcacgaacaccaatcacgctcaaactttgtgcatttggcgcggtctccaaaccagctgttcaaaccactctctgcggagcgattcttgcgtcagaagacgggcagcccctcgactggctcgtagcgtgtggcgcggccacgaccacgagattgcgcaaagccgtcttcaacgagacttttcagcagtgcccgagcacgcgagacccctaattccatatgctccgctaattcggaagttgatatgctgccttgactcacaagatactgtagcgcttctgattccgatttggagaggtgtcccacggaagtccaggatttcatggactcgttatttgctggcgtcataacagatccgccaaggtttgtgtaccgtactacaagttttacgcgatcaggacgagttagcacttccagcagtggatgcggcgcgccaacagaatcacaaccagctcgcatcacatcaaagccacttcctgctttttcaccgataccgatgagaaaaaacattttcatgaggataggattgcgtgcatcagatattccaccttgctccgcctcggcctttgtaacacggagccgcccaggattggtgaactcgatggttgattggcgcctaataatcacagtgcctcttctacccatatagtccgcatgaacgatagcgttggttaacgcctcgcgaatagtgatttccatgggattttcatccatacgtcgcgcttctccgtccaaacggaatgggcgcggcaccgcctgccgcagcctaccatatactgactgccaaaaatcatataagttgccggaccaaattccgtcagtagaggtaatgcgatcatcccaacgatcgagtccaatttcttcacgatagtcaaggaaataatttgcgaattcccgcacgatatcatattcgcgcccaaacatcagcaatccagcaatagttggatgcaactgattatctttggtagaacgagcgagcgcctgcagacgcacgagaaaatcttcgtcattgaggttacgccacggatggttcgggcgaatcctttgaaaataagaacggtacgaggcaatcgtgcctgaatccaatgcggcactacccaaatcttccacgatacgaagatcctgaggagtgtcgctgccatcgcgaaacattgctttgacttcatcccggtcgcaatggtagtcaccctcgttattccttctgaaggtgcccctatgctgttcccggctaaaaggatcagcgcccacatatataggcatgatctcccgccctgcacgagggacatgaatcacgatgaaatcaccggacgatccatgtcgaatcacaacatcttggtcggaaagtactgtggcgttgaccttggaacggtcattgacagtattccaaaaatcccgtttgagcttttctgcatccgttacccctgttacattcaattctcgtcgcgagttctctgaaacaccaagaagaataagaccgccatcagagttggcaaatgcactatacgtatcccatagactgtctggtaatttgtctttggcctttttcgcctcaatacaattagcttctcgaagtagcctcacatccgactcggaaaggctggcaaaagaaatcaactcaataacgtcagaattcgccactttatacgcctttccgccagtctaccgccactttatacgcctttccgccagtctaccgccactttatacgcctttccgccagtctaccgccactttatacgcctttccgccagtttttcattctggggaagccgagccatgttcaagcagcgtcatccccccacttgcaacattaaaaacacaaaagcctgaaaccggctattgcctcagcaatattcagtcggtttcaggttcaatcgttaatcctctggcgaaacgacgatctacttcttcagcagcggtgcgacctgctcctcgtaagcggtgagggcggtgtcgatcacgttgtgcatgtcgtagtacttgtacgtgcccagacgaccgccgaacacggtgttcggctcggccttggccttggcctcgtactgggcgtacagggccttgtccgcgtcggtgttgaccgggtagtacggttcgtcgccgcgctcggcgaagcggctgtactcctcccacaccacggtcttgttcgggttctgggagtcatgacgttccgggttgaagttcttgaactcgatggcgcgggtgtagggtacgtccgcgtcggagaagttcatcaccgggcagccgaagtggtcgccttcgtcgtagcgtacttccttgaagtccaccgtgcgccacttgaggtcgcccagctcatagtcgaagtaacggtccaccgggcccgtgtacaccaccggcacgccggcggccttgagcgcggtcttgttgtacggctgggactcgtcgaagaagtcgacgccaagctccacagtgatgcgcgggtcgtcgatcatgcgctccatccacttggtgtagccgtccgtgggcaggccctcccacgtgtccttgaagtaacggttgtcgtagttaaagcgcacgggcaggcgcttgatgatggcggccggcagctcggacgggtcggtctgccactgcttgccggtgtagttcttgatgaacgcctcatacagggggcggccgatgagctggatgcccttgtcgttcaggttggccggatcggtgccggccagctcgcccgcctgctgttcaatcagggccttggcttcggccggcgtgtaatgcgcgtggaagaactggttgatggtgccgaggttgatgggcagcgggtagacctcgccgtcatgcgtggcgtacacgcggtgcacgtagttcgtgaagctcgtgaaacggttcacgtagtcccagacgcgcttgttggaggtgtggaacaagtgcgcgccgtacttgtggatctccgcgccggtctcctcgtccatatacgagtaggcgttgccaccgatgtgatcgcggatgtcgatgatgtgcacacgggcacccgtatgctccaccgcctgctgcgccaccgtcaggccgaacaggcccgcaccgacaattaccaaatccgggtactgcgcgccctccgacgggccgtgctgcgtattctccgccgcatttgccatgactcaaaacctttcatgatcatgtgcgattccacacgcgtttcattgtccaccagtgtagcgagaagcacctatgtacacatgcgattccgaattcagcggctcctataggcggcttccggcttgcgtaggctgacgcgcgacgtgcgcctaccctgtgacatactgttcatgtccgcataaacaggcgcctgccggctacgaccgcagggcgcagacacgtgaagaaggattcgccatgacgcaggtctcgccgcctgtctcgttcatcgtgccggtgtacaacgccgagaaatacctacgttactgcgtggactcgattcttcggcagtcgtatgagcatctggagatcatcctcgtggacgacggcgccaccgattccaacccgatgattctggacgaataccagcggcgagacaatcgcgtgcgcgtcatccaccagacgaatggtggcatcgcgaaggcgcagaacgccggattggatgcggcgcacggcgattacatcgcgttcgccgacaacgacgacatcctcgaccgtcgcaacatcgaactgctgctgcacgcgctgatttcgacgggtgcggacatgagcaaggcgcgttggaggcagttcggcgtctcccagatcgaggaagtcgcgatggaagcctgtgaaggcgccaccgaacctgaacatgtgagcgtgttcacgaatccgctgaacgcctaccagaccgtattctgcaagagcctgcgtctgattggcaacaagcttggccataacacggaggcccgctatttcaacgaggcgaactggtgccgcctgtacaagcgcgaactatgggacggcgtgcgattcccggaaggcatgtacgcgcaggacacagctatcgcaggacacctgtacgtgcgcatgaacaaagtggcggatattgacgtgaacctgtacaactggcttcagcgcccggaatccgtaacacaccaaaagcgtgacttcgcgttccaccacgaccacaacactgcggcatcagataatttccgtctctgtcttgaccgaggcgtcctccccatgcgtagctactacacgttgatcggcgaactggaagccgagagggaagctcctgacttccatatttcagaaaaccagcagcagtacgaaaccgaccgtcaggaaattgataccctcctagccaatctcacccgcgcacagcgcatgcggtgcgccgtcatccagcgcattcgtctgtttgaaaagtatatctacgaccgcagaatcaaaaatatgcgataaacactctttactgtacagtcctcctcggccaataaaacagagcccgttgtctagatggaagtgcgacaccctttaaattggagattgtctagataaccagtgaaagggtgtcgcaccttgggtcaagtgtattcgcacctgtcggaagaggaggtagtgcccgatatcttgcgcactttggtcttcgtccgctcctgtggcgatgatcaattcgcttcgtgtacggtttcaccgagtcgggacatgtcgaggtagcggcgcgtcgaccactcgctggaggtcacgtaacgaactctggcacagatgagcattaacgcgctcctgccgtccgggaacgagccgaccacgcgcgtgcgccgtctgatctcgcggttgagccgttcgatcatgttgttcgtgcggatgcgccggcgatgctcccagggatagtcgtcgagcaggtaggtcgtcgtctcgccgatggccaccagtatgctcacgttctccaccgagcctccccagcaccttttgcgccacacgccgtccatgaacacgtacggataatcctggaccagcgggcgctcccgccatgcgtcgatatcctcgtagacgcgtttgagcttgtcgcccagggtctgcgagggcatgcggtcgccccacaggagctggcacacgtcgtcgacctgacgcgtgctcacgccggccgggtacatgtcgatcaaagtctcctcgacgctctcctcacgccgacggtagcgttcgatcacggccgactcgaacaccgcgccccttgagtttcggcaccttcaggctcatcctgccggccttgacggtcaggtcccgctcgtaatggccggcccggtatgccttcctctccccgctgcgctcgtatttggcggcgcctgatctcatcggcctgaagcgtcgggcatcgcgttcaacgtctcctcgacgctcttgcggaccatccggtccagggtggtctccaacatggcctggtcgacctgtagaatctgctgcgacatggcttcgtgccctcgctttccaatcgcggttttcttatgtctggcgactgaaaatcgtacacaggacacgggccatgcccctacctcaggcccaaaccagagtgcgcaaaaaacggacgttatcacggcagacgaacagcatcgcacaatacatcaagagaaggaaagagccaatgccgaatcgacgaatctacacatcagccattgcctcaatcgttgccgttatatgcgtcatcaccattcaatgctcctatgcatcatatgcagctgcggctgaacctcaacatacctataccgtcagtgatgacgttcaagtggagaaaactcatgcaccttctttgtctgaagcgcctttcatctacggtccacagacccgttctttcaacagtgtcgcatcaccaagtatcactaaaaatcttactgggctttctacggttggcgttgaatggaagcagcataacgacgttgcagccccatcaatccgtcttcgttatctcaacgatggtgcatggagcacatggatctcattgagccccgccagcgataacaccaaggacagcagccctatgcaatataccgacccggtgtatgtcggtaaagccagtcaggtggaggctcaattcgtcgcgcaaccaggtacgttatcgtccttttccgatatcgcattagtcgctatcgataccggatatacgctatcatcgtcaactaatcaatctgctagttccacttccaaaaatattgcggaaccaatagctgatagatcgaaaaccacctccgccgcacaaccggtaacaggtgccattcacacccgagaagaatggtgggtcaatggtaatccggcaatggactgggaaccagaatacggcagctggcagggagcaatcggtcatcataccgtcaacgtcaatgactattcgcaagcagaagtacctgccattatcaatggtatctatgtctttcatagcactggacgaggctggggagatatcggctacaaccttatcgttgaccgatatggcggaatctgggagggacgcgatgagggcgtaccccgtcaggtcaaacccgccagccaagttattggagcacaggcaaaaactttcaactcagcaacattcggcgttgcggttctaggaaatttcaccaacgacagtccctccgatcaagccgtgcaaagcgtagctgcagcgattgcatgggaattcaacgctctcggcatctctgacccgaatggcacattcgagtatcacggcactcagcagcgaatcagcggtcacggcgattcctcgcactgggtagattcggccaataggacacaatgccccggagtgggactgtccaaccaaatcagcaatatccgtaatctggtatctgcctacatgcttccccagattcagctcacatggcaaatacgccaggaagacatcgcagtcggggtcgctatctacggtgcaacggcttctcttgagtacaaatggacatcctacaacgtagacactggcacctggaaactcatcgccgactggaacggcggtaattgggcaggatggtctgataataaaggaacatactggctccgcgcagaagctcgcaatgctcagactaaggaactagcggccgagaaaactatcgcattcgcttatgcccccggaagcaagcgcataaatggcacattttccggatggcaaggtaatcgagttctcttaggcatgtcatctgatgcccaaaatgtctcatatcaaatgaagatatacgatgtcagcagaggcacatggatcgctggattccgcagtcaatgggcatactggaaacccagcaaaggtatctactggacacactatgaactatatacatccaccggcaagctcgtagacattcgtacttacgccttcggcgtgtaaccgtaaagttcacgacgttagtcggggattcgaatcgcgtacctaatcgacgccgccccgctttgttatactgagcaccatccacaacacaaataaaggaaacagacttgactctgcagactacgcctcttgtatcgattatcataccggtctataacgccgaaaaatatctccgatactgtgttgattccattcttcagcagtcatacaccaatcttgaagttattcttgtggacgatggagctaaagattcatccccatccatttgtgacgactatgcacaatccgattccagagtaacagtaattcaccaacccaatgggggcatcgcgaaagcgcaaaacaccgggctcgacgcagctcacggtgattacatcgcgttcgccgacaacgacgatatcctcgacagccgtaacatcgagctactgttgcacgcattgaaatcaactggcgctgacatgagtaaaggacgctggcgtcaattcggcgtctcgcaattaccgaccatctgtaatgaagccgctcagggcgctgacgaaccacaccacattaccgtatttcgtaacccgctacgggcttatcaatccgtattctgcaaaagtctgagaattatcggagaacgtttcggtcgccatactgaggcgcggtatttcaacgaagcaaactggtgcaggctctacaaacgcgagctgtgggacggactgcgattccccgtcggccattatgcacaagacatccgcatggctggccccttatactctcgtatgtacaaagtcgccgatgttgatgcgactttgtactactggcttcaggaacccgactcagtcacgcactcaaaacgcaccccgacattttggcacgataatgtactttccgcagcgaagaacttccagttcacccttaatcagggaatagtgccataccgcaattacttcggattgactgcgagtgttcgtgatgaaggacgcgggctgcatcatgcgaacagcagcacaggctctgctcaggcccagttcactatctcagccgaagatataaagaactaccaggacgacgttcaaaacatgaaatctcttattcgacggctggccccgtcacaaaggttcctctgcaagatactgtacttcatccgatcaggagaaaatcttatttacaaccgtcgaatccattccatgaaatgacccaaacgcgcgctcactctggttgtggatacacctcttttgtgaagaaaaacatgctggtattcgcaaaatgtcatacttacatgccccgctggtacactctgtaggtatggttgaaagaatactggtcactggagccggcggttatatcggtaggcatgtcgtcaaggcgttgcttgatgatggacaagacgtcatcgcctcggatctccgcttgaacgatgttgatgatcgtgcggaacacatagagaccaatctgtttgaatctggtaacgatatctattccaagcttggaaagccagatgtctgcctgcatatggcttggcgcgacggcttcaagcacaactccgacaatcacatgggtgatttatccgcccattatcgattcatcaagaacatgttggacggaggtcttcctcaaatagcggttatgggaactatgcacgaagtcggatactgggagggtgccattgacgagcacaccccttgtcatccggcttccatgtacggcatcgcaaaaaatgccctacgtgaggccacgcttatgctcgcacaagaacacaatgcagccgtgcaatggctccgcgcatattacatcgtcggagacgatctacgcggtagttccatcttctccaaactgctgcaagccgcacatgatggcaagccgtccttccccttcacgacgggtaaaaataagtacgactttatcaatgtcgacgaacttgcacggcaaataagcgcagcggtttcccaacgagaggtgaccggtatcatcaactgctgcactggaaagcctatatccttggctgagcgcgttgagcaatacatcaaagacaatgatctcaacatcacactggattatggagcgttccccgatcgtccctatgattcccccggcgtatggggtgacgcgaccaagattcacgagattctagcgacacgatagatcgacaaaacatatgggttggggcggattccatcgcgatggaatccgccccaacccatatctgctattagcagcaactcattgagtactacttctcaaccttttggaacatccgcgatacatacgccactactgcatccgtcacgcgcaaaagcatccaagacaagaccgcaataatcaacatatccgccacgaatagtaggtaggcattggatacgccgaggctgtcgggattgacaatggtgtatacctgcatgatgacttgatgatggactaagaaaatcgcataggaatatttcgatagtgaacctatagccactcgaacgggttgacggtcgaaccactgcgagatccacactaggaacaggaagaaggccacacccaccagtgtgaccgccacgttgcctttcaggatatcggtagactgctgtactgcgagaagcactaccgcagctgcacccaccacatggggcacttttttgataaagcggacaaaatacatcccgaagacaagttccggcaaccggatggtcagtaacaaatcagatggcataccttgcgagtccggatacagcacaatcgtcagcacatacaatatcgcgatgataacgccggtaatccaaggatgacgcttcaccccataccgcagcaaagggaatatgacatagaacagcagaataaatcccaggaaccattcgccaagtgtatagaacgtcggtattccggcattagccagataaccatccattccaatcacggagagcagcacactatatttcggtgcctgtgccgcgacgataccgccctggcgcaagaacaggtacacatttgccgcaatgaaagcaatccagaacatggggaagattgatttgcatcgcttccaatagaacctctttagatccagcttctccgcatcctcatgcgaatacatcaatgcagcgccggaaataatgaggaactgagagacaccaagcgaaccgatgtaaataccgaacggagaattcgcaaaaattgggtgttccaccaaatatggattattgaaatgcgtgataacaatcaatatcgcagacagtccacgtacccaatctaggtagaatagtctcggcttacgcttcgtgacattacccgtcatgttactcatcctcgtttatgcccaattgcttacgatgcaacttcaccaacgccggtcccagcaccggaacatgtttagtgacgttcttcatcactcgcagtaatgtgttacggaatcgctttccttcagcgatggcaatgcaagtttgctgcaagtcctcacgaatccatggcacagtgatgacctttaccacttctcgcaactcatatgagagattcgtaatctcgatacgtgcataacgatccgagaaaatatacgctgggtaatatccattggcctgtggcacatatccataggcccgctcaatgaagtgcaataacgtaccatctaccttattgggctccggcggaaagtccgtgtattcccatccatggtccagtaagccacgaaatgcttccggacggaaccagaacatagtgcccatcggcgccaccggttctttgtcggcattcaacggaacgtgcatattcagtgtctgttccaagaagtccttggtaccggggaaattcggtccccatgggaacgtgtaccccgggaaatagctggcatggttcggaggagtcggcatagcgatgccgaggcgcggattcctctcgaacaagtcgataacgttggaaacatactccttgctggcaagaatgttctcaaagcacttatacgcgaacccatcaccgatactctgaggagacagctgcgtaaccttcttgtcgtgggcaaaacaaacgtaatcgtactggaacaggtcttccccgcaaccaaccagcagggcactgacatcacgtcctctgttctcaatcaccctgacatcgaagttatatgggaactgcttgcaatattcacgcacagtttccgcgttggcttcggagccaaccgtaatgatgatgtcacagccttcgggcatcgactggatgtagtggaatgtggactccagcaaatccatgtaataaacatgaattgcaagtgctattttcttgccttccggcagaggaacgctcagcgattgcggcaatacataatcaagatgcaggttcttcatcaaatcagcgacgttcatcgtgcgaagcgcgttctgccagatcaagtccacgtcatagtcggtgtggtcccgcaaatattcatataagtccagagcagcgttgcctacggcctgggtcatcacatcacgatacccgtggaagaacgagcgacgtttgaaaatcgggcaacgcttctctgcaaccaaacgtttcgcagcataggtgatggggccgtatgtgaacccctccagatcggaggtatcgacatacacgtcccatttgaatcccttatcggcaaaacgcttggtgaacagggattcgtgcagacccacagaatcgtaataatcgttgatgggaggaatgctgtcccagtaatctctgaacgcctggcttgtgtgcaagcttttgcgataggcgtggaaatgtgactgaatatgttccggcagatagggatacgggctgtgtccaaaaggatcgtgctcaacacgatggaatttggttataccccagaaatccaaatcccgcttgctcatcgcctcgaacatttcggagaacggatacactggccccataatggtggcgttgaatagtataatctcatcgaattgttccagcttgtgccagccgtaactgtccaaagcggttttgtatgcccatacatcaaaacccttgttctctcgcacaatcagcttactggtgtaccgcagcagtttctcgcgcccggcatcattcaactttccattgcatacaatggtcaggtcagagaagtgcggcatgaaaccgtcaagcagcttcagcacatagtcgtccacgaccccctgagcgtcgtaaaagaagaaaattcccaggcgattgataggcgtatcagacgtaagaatcatggattgctctattcctcttccaagtgaagtaaacagacacgaggatatcatatgggcccgttatcattactggcatccgtccctcagccagtatgatgaatactgattagctgtaccgtatctggatactggaggaatgatgggcagaatagcgctatgcggggtcttcgatattcccaactacggagaccatctcttccccttagtattgcgcgaagagctctcgcgccgaggatacgccggtaacgtggtgttgttctcaccgttccaagctgaggaaagcttcgtggagaactctaacgtccactcgcttgacgatctcgaacgtatgcatatggaagaaccattttccgcaatcgttgtgggcggaggggagattatccactggcatcgctttgggcaaaaacgcaccttcaacagtaccgactttgaggcttatcctatggataaggtctggctcgtcccttgcttcatgaagatgaagtataatgttccactgctgtggaatgcgcccggcattccttttgacttcgatgcggacaaggccctcgcccactacctgttcagtaatatagactatctgagcgtccgcaatgatttctccaagcaggtgctgattgactgcggtataccggatgcagccattcaacgcgtgccggatactggtttctctttgaagaatgtcgccaccgaccaagaactccacgatgcgcgcaaccacgtgttccccggattagcgcattatgcggtgttccactgcaaccgctttatcccggaatccgaaatcaacaatgtcgtggccacgctcaaggaattgcatgacgatggacatgaaatcgtgctgctgccgctggcctatacccatggcgatgaggatatcctccacaccatccacgatgcctgcccattcccctgcctcataccccaacacccgctctctttactggagatcatcggcatcctgtcagactgcgaaatctatgtgggtaccagcctgcatggatccgtaactgcgtccgtattcggccgtaagacggtaagcttcgattaccagcagactaagaagacacgagacctgtaccaccaacttggacgtgacgctttctatgtcactgatggcaatcagcttgcagaaaccgtatcggatgctctgaaaacgcaacaaccggttgatttcttcgatacccaacaacaactcaatcagcatttcgacaaactattcgcactgattacacaggggaacatcgtcactcctaatccttcctcgcaggccacacaattctcggacctggtgcagaaatgctttgatgcagaatatcgatccatcggattgtcacaacgaatcgacgaactggacacggcattggagaaaaacgaaggattcgtgaattacttcaaaccgcgagccgagtatttcgagagtgagttgaacaaacagctgaatcgagtacacgaacttgaggagctccaacagcacccggtgaaaataatattgcagaacatcaagcataagtgaggaacgccaaatgacagcatcaatcagcatggatacaactacaacgactcagagtatcagccaaaatgataattcctcattgactagttactcattacaaggatttttgcaatttgttatgcataattctaagcaaataattatctccatgttgttccttctgcttgcatttgggcagaagctttttagcaacactttttccattgatacacagggcatcattcaaaacaatgatgcactctacaagtcatggttcgaacttgaacgattcggcctagtgctgtttaaaaagctgaccggcacctatctctataacaatgcgttggcttcgttcaccatggtggtgttctttggcatttccgccatggtatgggcatatctcctatgctcagcttctcacaccatgaagttacagccggcgttcttcataatcccttacgtcgcctcacccattttcgccgagatgttgggatttctgttacttggcccagagatttccattgcagccatactgactgcgatctctctcatgatgtgggccaatgcggcagccagcagtagtgcaaaacagcgcattctgttagtcatagcctcaatcgtatgtgccacgctttcatttaccatgtatctagctatggtcacgtttttcatcaccggaacggccatactctatgtcctgaaatacagtgacagcaaatatcagaatcacgacaagaacgaatctcgcgcatttcttatcggtagtgtggttatctttgtcgtttcatatgcattgtataagctgctcaacgctttggcgatgaaggtcaaaggagtaacgaccaatgcatacatcagcgaccaatcgcgttggggtaaggattcgcccagcgttatattgcataacatgggctcgcatatactggcgttatactcgggagaaggtattttctatagcgtcatattctccatttgcgcactatgcgtgtttgtcgcagcgatatatcatgtcataactaagaaaatatcgcttttttcctgcctcgtagtactcctcattgtgctgtctcccacgattatgtcattcgtactgggagggattccttcagttcgcacggaaatgacatatccgctggccttctcgttcatcacaatggttttattctccggtattgttttcactatacagagaaacgcgcagtccatacgtgccgaagccgtcacaattgttgcttggattctaattatcgctatcggctggaatcaagcgctgataacgagtagaattttctacacggaaaatattgtcttcactcaagatgtacttacagcgcaagaaataaagtctcgaatagatgaattagggcttggggagcacccaaatgaaccacttgtctttgtaggaaatcacgtcgccaaatgtaaccccgattgttattcagccgatcagcttggtctcactggtcgttctatgttggaaatcggattctccactgagcatggtactggagtaaagaaacaattcatggtcgatgtactcggagtttattacaacagcgcaacatctgagcaaatagagcagagtgaagagctggccgaatcgatgcctcattggccggatccaggaagtgtggcagaaaaagacggtataattattgtcaatttctgatcaactctgaatttcagattttggtttatcgacgcactcaccgtgttcaccgcgctcatcatcgtctgacggtctcgatgcacgcagttccttaatcacgtaaacagtgaatattacggataagaccacatctaggaacgacagtgtcttgaataacgtattgaaccaaaactgagaaacttcagatatgagtccggcatggtatgccatcacctcattgaggaaggtcaatgcaatgaacacgagaagatagaaccgatctggcaatttattgccaacacaaacggcgataagcagaaacgcgataacaggaatctgatagcgctcatgctgctgagtcgaggataacgcctgaaattttgcgcaccttggtctgggcctgagatagaggcatggaccgtgtcctgtgtacgattttcagtcgccagacatgaaaaaccgcgattggaaagcaggacgcaagccatgtcgcagcagattctacaggtcgaccaggccatgttggagaccaccctggaccggatggtccgcaagagcgtcgaggagacgttgaacgcgatgctcgacgcttcaggccgacgagatcaccggcgccgcgcgctacgagcgcagcggggagcgcagcggggagcgcaaggcgtaccgtgccggccactacgagcgggacctgaccgtcaaggccgggaagatgagcctcaaggtgccgaaactcaagggcgcggtgttctcctcggcggtgatcgaacgctaccgacgcagggaggagagcgtcggagaggcgctgatcgacatgtacctggccggcgtgagcacgcgtcaggtcgacgatgtcagccagctattgtggggcgaccgcatgccctcgcagaccctgagcgtgtatttagtcaagtcggtgtttcgtgtttcgtcactaatttttttcggttttcggcatgaagcgtgccggccggtggtttgttttactggttgtccgtcttgccgaacatgagggcctggctgacgcgtcggctggggccggtgaactcgatgaggcgtccgtggtggacgatgcggtcgatgatcgcggcggcgagtttgtcgtcggcgaagatcgtcccccatttgctgaactcgatgttcgtggggaggatgatgctgcgccgctcgtagctgccggcgatgatctggtagaggagacgggccccgtcgatgtcgaagggcacgtagccgaactcgtcgaggatgatcaggtcggcacgggcgaggtctttgagcaggctgtcgagggcgccgtcgcgtttggccttgccgagctggagcacgagctccgcggtctgccggaacctcacgctcctgccccgttcgacggcgagcatgcccagggcggtggccaggtgggtctttccgcgtcccgtcttgccgtagaacacgaggtcctgcgccttggccgcgaaatcgaggccggtcagctgctccttggtgtatccgtcgggcaggcgcacgttcgcgaagtcgtagccgtcgaggctcttgggcaccgggaaccgggcctggcgcatgagccttgcccgtttggacgcctccctgttggccagttccgtggcgagcatgcggtctatcgcggcgagctggcggggcgtggcccattcgagcgtttcgtcgatggtggcctgcgagatgaacaggctcctcgcccgctcgcgcagcgggccggggtcggtccgtccgttcttctggttcactcgtcctccttggtgtaggcgatgtcgtattcgctcaggtccacggggtcgtcgtaggccacgggtcccaggcccgaggcgtggcgtgccgcggccagacataccccggcccggtccgtgcctccggtggattcgaggatctcgagcatgcccgccacggccgcccgccagccactctcgccgtcggcgtgcagcagggcacgcaggctgtcgcgccgcgtggcctcgtcctgcgcgtcgatccattcgcgaagcgggtcgggcatcgcgtcgcgcacccggctgttgcgccaggccgccggccggtcgcacaacagcccgagctggctcgacgggtcgccgctgtcggtcggcttgtccccgtaggacctcggatgcgtgatcacgcgtttgccttcggcatcgaggatctccacctccagggccctcaggccgacgatcatctcatggccggcgtgttcgggtccggccgcgtaccggtggcggccctggacggtgatgttgccgtatttgtcggccttcatcctcgtccacgtgaccacgtcgaacggcttggcgggcaggggcagcagcgccttgcgatcatcctcgaacaggccggcctggctctcgcccttcctgtaatggtccttgtcccccagctcgagacagcggtcgggaaggcgcaggttgaagctgtcgaggctccacacgctgggcaccggcacgaacagccttcggcgcacggccccgaccctggcctcgaccgcgcccttctcgtggcccgagtacgggttgcagaacgagtactcgaacccgtaatgggcctggaacgcctggaacaggcgggtcaggcggatcccgtcgaaccgtcggcggcccacgccggcggcattgtcgtacacgatgcgttcgggcaccccgcccagccattcgaacaggttcctgagggcctggcacgtgcactccgcgttctccccgggcatcagctggcacggcgagatgttcgagtacgggaaatccaacacgaaatgccgcatccgcgtcacgacgccccggtagcgcacgtcgacctggccgaagtccgcctggcattcgcccggatgccacgacaggtccaggaaacccatctcgcgctccgccatgaactcacgcttcaaccgggccacggtgtgtctgttcaatagaagttaggccgatgcagcgtaactattcagtccgaaaaagcggtaggaattagtccgtttcaccgaaatggcgagatgaagggcaccggcccgccataacccggctattttcccgagttgaaacacatccggccgacagggccactcgggaaaggaaaggaatgacgaaaccggtgtcgatacaacaacgtatcaggattctcgacgcccagggcgtgtcatggcgcgaaatcgccagacggcttggcgtgtcgagggataccgtcaggaaatacgcgaccatggaggactgctcgccgaaacccgcggtcaggaagggacggcgttccctgaccgacgcgtattccggcacggtggattcgtggctgttcgcggacaggctcatgccccgcaagcagcgccataccgccagacgcgtgtacgccaggctcgtcgaggaggagggcttcgagggctcgtactcgtcggtgcagcgctacgtgaagaggtggcgcgaggagcatcggtccgacggcgacggctatctcgagctcgactggagcgccgacgtcatgcaggtcgatttcggcgaggccgtcgccacgatcggcgggggcgacgtcaaggtgcactgcctggtcgccacgttcccgcactcgaacatgcggtacgtggccgcgatgccgggcgagaacgcggaatgcgtgtgcgaggggctggcccagatcttcgaccacatcggcatggttccccgcgtgctggtgctcgacaacgccaccggtgcgggccaccgcgtcgcgtggaacaaggtgacagtggtgcgcgtgttcgccatgttctgcgaccactaccggctcgagacgaggttctgcaacccgtattccggcaacgagaagggatccatcgagaacgcggtcggcttcctgcgccgcaacctcatggtccccaagcccaacgcggagagtcacaggcagctgacgaggcatctgctgtcgaggtgcgacgcgatcgcggacgtggaccactaccgttccggcaggccggtacgcgagctgttcgacgaggaccgcggggagatgcagccgctgccgcgcgcacgtttcgacgcggtcgaatgggtcgagcgcaaggccgacaaggagggcaacatccagatcggctcggtccgttacctcgcgggcccgtcatggcgcggctggacgctgctcgcgggcctgcgcgcgttcgaggtggagatccgcaccgccgacggcaggcacgtgaacactcttccccgctcctacggcgatggcgggcggacggtcaggaaccccgccacgctgctgcccgcgctggccaggaaacccaacgcgtggggcgagtcgcccctgcgcggcgagcttccggacgggctcgtgctgcgtctcgacgcgttggaccccggatcaagacgacgcgagctgacgctcctgcacagggccggcgtggcgagcggcttcgggaacgcggtcctcgccatggccgcgatcgtggagggcggcagggcgcccgacgaggccagcctgctcgcactggccagacggatcgcgcagggcgacccgcccgacccggacgacggggccggcaggctcgccgtatacgacgcgttcaacaaccccgacgggaaggggacggagtcatgacgaggccgtcgcggaccatggccgacaccagacgcagacgcgcgtccacgggcaggatgatggacgagatcatggaactcgccaggagcctgcccctgaccaggcaggtgctcgcggacagcctggagaccgcgaccccggcccagatggagttcatgctctcgtggatgaacgaggagctggcgtcgagggaacggtcgaaacgcgcgcgtctgctcaaacaggctgtgttttgtcaagttggggtctgcgttttgtgcggtgtttttccgcagtgtaggcagcgggttttccgcagggtgtgcggtatcggccgctgcctgtctgcgttgtgttggttatttggtcatgagggcgtgttcgcttcggtaggagcggccctcgaatctgatgagccgtccgtggtggacggtgcggtcgatgagggcggcggccatgttcttgtcgccgagcacgcgtccccatccgctgaattcgatgttggtggtgtagatgatgctccttgtctcgtaggaatcggaaatgatctggaagaggagcctgctgccctcctcgtctatgggcaggtagccgaactcgtcgatgatgagaagtcgggccttgccgatgctcgcgagttcccggtcgagccggttctcctgctgggcgcggcgcagacgcattagcagtccggtcgcggtgaagaagcgcaccgggacgccccgctcgcaggcgagccgtccgatcgcgatggccaggtggctcttgccggtgccgacgggcccgtagagcacgaggtcctcgcatccggcgacgaagtcgaggttctcgagctgcgcgcgcccccagtcggcgggcatcttcaggttggtccagtcatagccgtcgagggtcttgtcggcggggaagccggcctgtttgagcaggcgcaggcgtttggatcgctcgcgcgagtcgagttcggccgtgaaccatcgttcgatgaagtcgagctggttgggcgtggcctcggcgagcgtgccggcgagcacgctgcgtgtcagggtcaggctgcggctcatcttcaggatgcgttcgcttttctcggtcgtggacgcgcgcctgcgtcgggtctccgggatcaccggatcgggtctgacgctcaccgttcttcccctccgtcgtccgtgccggtgatgaaccggtcgtagccgctcaggtcgggctcctcgatcccgccggggtattcccactcgccgtcgcgcatgcgcaacgcgatcggggtgagcgagtccgcgtgcaggcccatgtccctgttcgagcgcaggatctcgccgcacgcctgcatcgcgggatcgaacccggccgcccggcacgcgtccccgatcgctttgaggctctccctcaacgtcttttcgtccatggaatcaagccacgcgcgtatatcgtcgggcacgtccgggcggatcgagctttcccgccacgcgcggggtttgaccgcgagccggggaagcacgagcgcgggatcctccacattgcgcgaccgtccgtactgtctgggatactccgcgaagagctcgccggtggcgggcgatgcgagcgtgaccgtgtcccaccggatcgcggccaataccctggaacgcgccgaatcggggccggcgaggtaccggttcgagtcgatgtcgaccagcccgtacttgtcggccgtccggctttcccagcgaaccgggtcgaacgccgtggacggcaacggcatcaacgcggccctctcctcgtcgaacacctcggccacgggcacgcccggcaacctcgggcaacacgagtccctggcgagcccgtcgcaccgctccagcaggagacggctcaactgcccatacgattccgcgcgcatgggcggcaccatgagattgcgccgcaaaaacccgaccgcgttctccacgctgcccttctcgttgcccgaatacgggttgcagaaccggacctcgagccggtaatgcgccacgaacgcggagaacaccccggtcaacgcgacctcgcccttcgcgttgcgccggccggcaccggtcgcgttgtccatcacgatcacgggaggaacacccccgatatgctcgaacacgagcatcaggccatggcacagacactccgcgttctcgcccggcaacgccacgcacaaccgcatgttcgaatacggcaacgaggccaccaggcaatgcacgtccgccatctcgccagcgatccgggcccgggccacgccgaaatcgacctgcatgctgcccgccgcccactcgagccgcacgtacccctcgcgatccggcacgccgcggttcgcctcgcgccaccggtgcacgtaacgcatcgtggtcgaatactcgccgtcgtaatccgtctccgccagcagacggtcgtgcacgcgcctgatcgtgtgccgctgcttcctgggcagcagacgatcggcctccagccactcgtccaccagatgcgcgtacgggtcgatcttcgacccgtacctgcgatccgccttcggcttgggcgagcaatcctccatatccgcgtacttcgcgaccgtcccgcgatccacgtgaagacgacgcgctatctgcgcgcgcgacattccctgccggtcgagtctcctgatatcttgcacaatgggcatcggtatcgccatgatcctttccttcccgagcaccggccggcggcaaccggccgaatccaattcgaattgcaactcgggaatatacaggcggcggcaccgatgcctctcacatcaccgggaaacgatgacggcaccggggaaaaccatcagcccacactgcggaaaaacactgccgaacccgcccaacaaacattgaagcaatacaaacaggccggactgccgggcgtcaaggaactcgacggctacgactggacgccggtccgcttccccgtcgactacgggcgcgaggcgttggaatcgttggacttcgtcgccaacagcgaggacgtggtgctgttcggcccgcccgggacaggcaagacgcatctcgcggtcgcgctggcccgtaaggcgtgcgtcgagggccagccgacgaggttcttcaccgcggccggactggtcatgcggctgctgcgcgcgtcggccgagggcaggctcgaccgggagctcgcattgatatccaaggcgcggctcctcatgatcgacgagcttggctacgtgccggtcgacgaggagggctccaggctcctgttccaggtcgtgaccaacgcgtacgagcgacagagcgtgatctacaccacgaacatcgagttcagtggctggggacgcgtgttcggcgacccgaacatggccaccgcgatagtggacaggacggtgcatcacggcaggatgatcaggttcgagggcgagtcgtacaggcgcacccacgccctgatgggatagaaaccaaacaataatggcggcgggtctttccgctcaactggactgaaacccgccgctttttcggactggattgacacgccattctggactacttcaatttgacaaaacacaccacggtccgggtcaccgtcgacaacgacgcctccaccccgtactcgtcacgcaaccgctcatggatgcgggtcgccgtgtgacgttgcttgtgccaggtctcccggtcctcggcgagcatgccctcgatcacgggaatccactcgtcgagcaccgagccacggcgtctccttaccggaggcctggccgacaggtcgtcggccttgagatacttgcgcacggtcggctcgctgaccttctcgccgcgcgcgatcgaggcgacggactccccattcctgcgcctctgacggatagactgtattttgggcatgctgatcatttgcctttccggccctttcccgaatggattcgaagcaccatcaggctaaggcccacgggtggtcggcatgcctttctgcctaaacccgaaaaaactacgtgactaaaacctcaactccctattgaacacatacacctgagcgacaagctcaagcgcgtctacgcagacatcgacgcatggcgggagcggcctttggagcaggaatacgcgtacctgttcatggacggcgtatggcacaaaaggcgctggggcggcagcgtggagaacgcgggcatcctggtggccatcggcatcggcgccgacgggcggcgcgaggtgctttcggtggccgagggcatgaaggaggacgcggaaagctggcgctcgttcatcaaggggatgctcgcacgcggtctgaagggcgtgagaccgacgaccggcgaccggtgcgccgggctcgtggcggccgcaggcgagctgccgcccggcgcgcgctatcagcggtgcatggtgcatttcgagcgcaacatcctcgccaaggtcaaccccaagaaccgcgactgggccgccgacgccttgaaggccgtgttctccatggagaccagggacaaggcgctggagaaggcggagtccgtcgccggggagatggaggcgaggaagccgaaggaggcggcgtcctcgcctcagggacggcatcggcgagacgacgacctacctgctcgacgactatccccgcgagcataggaggcgcatccggaccaacaacatgatcgaacgcctcaaccgcgagatcagacgacgcacgcgcgtggtcggctcattccccgacggacgcagcgccctgatgctcgtctgcgcgagggtccgctacgtgacttccaacgagtggtcgacgcgccgctacctcgacatgtcaagactcggtgagaacgtaccagcagcgaactgaccatcgccacagggacgggcgaagaccaaagtgcgcaagacatcgggcactaccattccctgggtatcaatcgagaaggtattgctaaaaagtttttgtccgaatgcgagtaacaagaatagcacggaaacgatgagctgccctgcatagtgcttactgaattgcaacaatccgcacacggaatatacagtcttttcctctgcggtagaggtctctgttgccagtgacatcaacggtctcctccaggtatcttgaagtacctccttagctcaagtatcgtcaaacgctgagaccggcacttgcaattcgattgttcgcagttttggaaacaacggcatgaaattcatccaggcacggaaaagcctcgtcattccccgtaatatcggcaatgccacttacagcattgtttcaatgtgataccttgggcgatgcttggactccagatagattttacctacatattcgcccacaacacccaatgaaatcataatgaagccaccgataagccatatcgaacacatcagtgacccccatccggccatcgcatgccccaccgttaatgacaccatgacatagacgaatatgacgattccaaccaagaccgataatgtccccacaccagtcacgaaacttaacggctttgtcgagaacgaggtgatgccctgaatagcaaaggaaatcattttttcaacggatattttgattcgccagcctcacgctcgccacgctcataatacactttgctggtctgataccccagcgtaggaacgataccacggaggaacaggttcacttcgccatattcggaaagcgccacgagtgcgttccatcccatcaaacgataatccgcataatcgggaatggtttccgcacccatccactggaacaccttatagaaggcctccgcagtcgtacgtttgaaccatgtatcttttttacggacggaacgtaccccatagacgatttcgtcgccttcacgattatttttgatgaattcatccacaacgttaacgtcgtcttgcaaatcatcgtccatggaaatcgccgcatcacacccagaatgtaacgcagtcatcaatcctgctagtaaggcattctgatgtcctcgattatgtgcgagctttactccccctgaatacagcaggattctcagcatgcaagtccgaaatgatattccaagtcttgtcggatgagccatcatccacaaatatgatgcggcttgcagcagcaatatttttcgacgcaacaaggagatcaaacttatgatgaagaacttcggctgtatggcgcaatccttcggcctcgttgtaacaaggcaacacgaaatacacaataggctcgtcacggttttcctcatgtaccgccaattgctcagcatattcagtagacaacgccatatcgctccagactcctagccaaccatactctcacggcgactttgtaatacagtaaccttcactgacctactactatcagttatctattgccgtaaactgtattgcacggtcactcagcacaccctgttcgccattccggtcatttctgatggcaaagtaatagctattgtcatcattcgtgaacgccaggaactcgggcttttcggcatcctcatcggtctgtgcacgcaacgtagcgaaaattcgatattcaccattgttgaacatatccagtggaatcgaatatttcactgtatggtggccgggtacgattggcatgcccttgcactccgtttgcgtgtcgacgtcatagacctgtccgcttctacgggaatcctgcagaacaattcccaaataagcagggatatcctcgttaaactcatactcaatagagaattcaagaggcgtcttgccatccacaacctttggcccatcactggtcacgttgagaatcggcacccgagaattcaacccgttaggatgaacgtatttcttttctcccttggtcttgaagaaatcattgttctgagcattttccaagctgtactggtctgccacattacgaggattaccagaacaaacgatctccccatcgcttatcagtatggctttgttgcaatacttcttcatcgaatccatgctgtgtgtgaccaggatgaccgttttcgttggatcttccttcacgctcttgaagaaagcatcgcacttcttctgaaatgcagcatcaccgaccgctaacacctcatcaagcaccagtatgtctccctgagccttaatggcgaccgagaatgcgagtcttacctgcataccactggaatagttcttcagcttctggtccataaactcgccaagctcggcaaactcaacgatatcgtcgtacatcgcatcgatttccgaacggctgaagcctagcaacgcaccgttcagatacacattctcacgaccggtcagctcaggattgaacccaacaccaagttcgatgaatggtaccagcttgccacgaacatccacggttccctgctcgggcacataaatctgggagataatcttcaataaagtagatttaccggagccatttcggccaacaatgccgaaaaaatcacctcgtcggacatcgaacgtaatgtctcgcaacacatgctgctcggtgtaccctttgattcccttcgtccagttcaggaatgccatcttcaaaccacttgcttgctcggtcggcaaccggaatgacttggctacatgcttgacgctaagaacaactgggctctgacgctccagactcacttcataatcacttttcattgcttacagcacctccgcaaacttggcattgtgcttgcggaatacatgcacacccaccatcaggattaccaaggtcaacacatacggtacgaatggtagccacctgctgttgatatatgtccacactgtcggcacatattccggtgacagcaaattatgacgaatgtccataatgacctgggtactaggattcaacatcaggaactcagaagcccacgcaaaatctggtgcccgctgggcaatcatgctaatcggatagataattggcgtggcatagaacatagcttgcatcagcacttcccaaatgtgggccacatcgcggaagtagacatacaacgtgctcagaatcagagatatccctaatgccaacaaatacaactgcaatatgttaaatggcaccaacagaatacgccacgtataatgcgcgtgggcaaagaaaccaaagcatatgaccaccaccatgttaatgccaagggaaatcatggaccccatggtgttggatgctacgataatgtagttcgggaaatgcaccttacgcaataagtctccgcgatcaacgatgccgcgcataccaacggtagtggcctccgtgaagaaagaccacaagcaagtaccacacagcagggaaatcggaaacgttggggtgccatcagagaatttcaggaaccggacgaacaccacatacattacggcaaatagcatgagcggtttcaataccgaccacgccatgcccaaaaacgagccctggtaccgaagctggaaatcagttttcaccagctcctgaaataccactaatgaatagcggtacttgttcctcacccactgcacaagtttcttcataaacatccaattctagcaagaggcgtatcagcaccagccttggctagcgcaacacccagcttacgctcgtgttccagttttaatagctgctctagaaatctgaagctatgccacctgttccgtgcaatatgtccatccttgtgaagaactcattcttattaaggcatcagaatgctaacatagtactcactgacggctaccatgtacactatgactcaagaagtgtttaccccgaaaaacatcattgtgaccggtggctgtggcttcatcggctctaattttgtccactatgtatataacaaccatccggatgtgcacatcacggtgttggacgcactgacatacgccggcaaccttgacaacatcaagtcattgctcggcgaccgcgttgattttgtgcatggcaacatttgcgacgccgagctactggacaagctggtgcccggacacgatgcgatcgtgcattacgccgccgagtcgcataacgacaactcaatcgccaacccggagccgttcctgaaaaccaatgtggagggcacgttccgtctgctggaagcggcgcgtaaatacgatgtgcgttatcaccacgtcagcaccgatgaggtctatggtgaccttgcccttgacgaccctcataaattcaccgaggaaacgccttaccacccttctagcccctattcctccacgaaggccagttcggatttgctggtccgtgcatggcaccgcacctttggtgtgcgcatgaccatctccaactgctccaacaactatggcccatatcaacacgtggaaaagttcattccgcgacaaatcaccaatattctggaaggtatacgtcccaagctgtatggtgacggactgaacgttcgtgactggattcacaccgatgatcactcatccgccgtgtggaccatcctcaccaagggtgttttgggagagacctaccttatcggtgccaacggtgaacggaacaatatcaccgtgctgcaggacattcttgaagtcatgggcaaatcccccgatgatttcgaccacgtcaaggatcgtccgggacatgatcgccgttatgcaatcgactctaccaagctccagactgaactcggctggaagccacgtcacaccaatttccaaagcggtctagaacacaccatcaagtggtacaccgacaatcgtgattggtgggagcccgtcaaagctgcaacggaagcaaagtacaagcagcaggggcagtgagcttgttaccgcttgggaaaacgtattggaatcgataagaaagacggaataaatgtcattggaattcgaaaaggaactcaaggtcaccaagaccaatattcctggcctgctggtatttgacttaccggttcacggagataaccgtggatggttcaaggaaaattggcagcgcgcaaagatgacagctctgggacttcctgacttcggtcctgtgcagaacaacattagtttcaatgccaaaaaaggtgtaacgcgcggtatccatgctgagccgtgggacaaatacatctctatcgcaaccggtgagattttcggcgcttgggtagatctgcgccccggcgacagcttcggccaggtcttcaccacccgtctagaccccagcaaggcaatatatgtgccgcgtggagtcggcaatagcttccaggcgttgcaggatggcaccgcttacacctatctggttaacgcccattggagcctcgaacagaagaagacctacacgttcgtcaatctcgctgatccggagctcaacattcagtggcctattccactggtagattccgagcgctcggaggctgacctgcatcatccaatgctgaaagatgccaagcctatggcgcctaagcgcaccatggtattcggcagtaacggcaaactgggccgcgctatccgccgctatgcggaaagccatggcctacacggatttgaatatcacgacaccgatacgttcgatatcgccgatgctaaagcctacgccgccattaactgggacttgtatggcaccatcatcaatgctgcggcattcaccgccgtcgatgaagcggaaacgccgggaggtcgcaaaaatgcatggagaaccaacgttcagggtgtcaagaatctcgcccgcatcgctactgagcatcgcatcacgctagtgcatatctccagtgattacgtattcgatggtaccaaggagctacacaccgaggatgaggaatttgctccgctcggcgtatacggacagaccaaggccgcaggtgacgctctcgtagagaatgtaccccaacactatctgcttcgttccagctgggtgattggagagggacgcaacttcgtgacccgtatgctgggactggctcagaaccacgcccatgccgaggcaccttccgatcagtttggacgcctgacctttactgatgacatggctaacgctatcttccatctgctcgatggcggtgcctcgtatggcacatataacatgaccggttccggacgcatcgcaagctggtatgacattgcacgactcgtcttccaaactgctggagtcgatcccgataccatcaccgctaactccgtagctgagtatgcccgtgaacaccatgctgccatgcgtccgcagaattgctcgctggatctcagcaaactggaagctaccggatatcaccctcaggattgggagcaatctctcacgacttatttggcaaaggagcttgagcagcgatgaaaggcattattctggccgggggatccggcacacgcctatacccccttaccacggttacttccaagcagttattgccggtgtatgacaagccgatgatttattatccgcttagcgtactgatgatggcaggtattcgtgatatcctcatcatttccacgcccaaggatttgcctaactttgagcgtctcctgggagacggttcgcagtatggcgtgaatttcagctacaaggtccagccttccccagacggactcgcccaagccttcattatcggcgaagagttcattgcgggcgaaccatgcgctcttgtgctgggagataatatcttctacggcaatggtttgggaaagacgttgcgtcgagcggcatccgtgaagcatggcgcaacggtattcggctactatgtggacgatccggaacgctatggcgtagtggaattcgataaaaaccacaaagcgatttccattgttgaaaagcctgagcatccagccagcaactacgcggtaacgggactctacttctacgacgagcgcgttaccgaattcgccaaacgagttcgtccttccacccgaggcgaattggagatcaccgatcttaaccagatgtacttggacgatgattcattgacggtgcagacgttgggtcgcggttacgcctggctggataccggaactatggatagcctgtatgaggctggggagtttgtgcgcactgtgcaacgtgcgcaaggccttcccatcgccgtagccgaggaaattgcctatgaaaatggctggattactcgggaccagttgcttgaggccgctgaaaagtatggcaaatctccgtatggccagcatctgaagagtgtggcggaaaaccggattatcagtcaaccatctgacgatccacagcaagcctgattgcactctttacagtagttggattctcagataaggcccgacgcagtaatgcgccgggccttatctgaggcttctgctgttttcgtgggttaggttcttggttgtggtaggcgtatgtcgggtccgccgcagcggagcatgatcagggcgatgaggttggtgacgtggtggaagccgtgggccatgcggatggtggccttgatcctgttgtcggacgcctcgagcctggcgttggagtatcccagctggatcgtgcgcaggatgtcgggccggcgccgccggatctttttggcgagttcgacgatctcgggtatgcgcgagtgggacgcccggaacacccagtggttcagttcgccgcgggcctgttcgaccggatgcttgagcagggtcctcaatagttccttgaactgctaggcgcggtagatctggcccttggggtccgtgttcctgatgccgtcgagcgtcgcggactgccggtccgtcaggtcgccggggttcttcagcacggcgtgtttggcgccgcgcatgcgcttcgtggcattctcgtccccgtcgcgcctcgcctggttccacaggcgtttcctgaccttgtccaaggcgccggtcatccaggagacgatgtggaagccgtccaatacgcgttcggcgttcgggcaccaccggccgacgcacgagtcaatccagcgggccccgtcaccggcgacgaccttgatggaggcgcgctgttcgggcgtcaacgccttgaagaacaggtcgaacacgtccccgccgaccccgtcgtgcgcccagatcacccgatgccgctcgtggtcgacgaccacggtcagatacgcgtggcccttcctgtagccggtcccgtccacgccgaccgcggtgagtccgtcgaacggcgaggacatcgacgccttgacgcgttccgcgatccgacgggcgacggcgccggcggtcctccacgacacatgaaggaaaccgctgaccgtcttccggttcgcgaccgtcatcagccacgcgcgctccgcctcgaaattgctccagcgcctgcagcggcagctcccggaactcctccgtataacgcacacccttagccatgatcccatcatctcctatcaaacgaggggaaaagacggaacaaaaaccaggtcacatcaaaaccaggccacttcatctttagacaccgaacgcataagtcttagtgtccgcgagtctcccatcagaggtatatacctcataatgagtccaatatataccctttttgggcttccaaatcgcccacggtcccttgaaaccttgcacccatttgctgcgtttaacatcatagattttaatctcataatgggcagccgcattatttgaactttcccccagcaacacatgattgttctgccatcccgcatatgttgccgccacgcgcgttgtgccgggtgcatacctgaaagcgattgtctgcgatccgataatcttacgagtccgagagtcacgtgcttccacgtgtagccaatagtctcctaactggtccacccaacctgcccaattggcacctgtccaatcggtgatggtcttccaacgtttgctggataaattatacgattgccatttgtaatcaatatccgatgaagggtaatcaaccgatgctccgacagcaatatcttcagagcgataaacccaagttatttgaaccgcgggagtgaattgatagttgccgaacgcgttcaggtccacgttgccgctgataccgttgaccttgccactgctcgtgtactgccagccgcggtcgttcgtggggaacgcggtgtactgcatggtggagccatactgggcgacccaacgggtcttgccgcggatgttggagctgttgagcgcgctgttcaggtagcttgtgtacgagtagacgctcagattgttgtaaccggccgcctgcagtttgccgtaccaggagttgacgatgccgtcgtacacgctcggactcgtcgggctcctgtgccccgtgtacgtccagttctccagatcgtagaacaccgggtagctcaggtcgcccgggttcacgcccgcctggcgcagcaggttcaccacgtccgcgccctcggacgcaccgtcggccgcactttccgcatacgagaagacgtacacgccgaacgggatgccgagacgcttgcattcgctgatgttgcgcttcgcctgcgcgtcgaaaccattgccccagccgtagctcagacggatgatcgcgccctcgacgcccgcgttcttcaccgcctgccagtcaatcgtgttctgccacacggacacgtcgatcacgcccttcgcctgctgggcgaacaggttgttgcgcgcgtcgaagaacgcctgcgtaccgttgtatgtgccccagtgcgcaccgtactcgttgttctgcaacgcggcgagcttcaccgacgcgttggccgcgcgcgtcttcgaggagaccgcgttcacgtcaccgccgttcgcagcgaccttctccttcacatccgcggcactcaccggaatgaacgactcaccatccgtcttcgccaacggatcgggctgcttgctctccgtgcccacgatcttcggatcggtgaccgtctcgcccgtctcgatgtccttcaactcgccttccggcgtagccgcatattgctcggacaccaccgtcgcgtcatcggaaatctcggcggacaccttgtccggcagctcggcatccggattgtccggcatcgcgtcggcagccgtctcatcggcgaccatcacaccgttcgcgaccggacgcgtcgcggaagtcgcggaccggacgccggacgcgtccgcgtcggcgttcacatccgcgagtgcgctggccggagtgacgcacaccgcgcccaacatcgccatcgccgcgacggacgccatcgccgcagtcacgccgcgcaccgcgccggatgccgttgcacgcgcacgcaacgcacgcagcatgcccgtcgcacccgtcgcatccgagccgtcgaaccgcttcttttccaccatgcgtaactccttgacgcacccatcccgcgcacccgcacaccgccacgcgttccgagggccgacggactctcacacgcggggaacaggcaggcgcaaacaggcgtaatcacaacgttttcaaccgtgctccagtctaatgagcaaggcggataagacagacggagcgaagcgggcaaaatcggcggagctccgccatacattccagcgacggcatcatcctatcttttgagaagatacttcctgtttctactgcgcggcggcgcagtggcgagaacgagtccacgtttaacgagccggctcaacgccttgcgcgtcgtaggaaggcccttccccgagcgacggccgatttcgtggacatcaagtggcttatccgccgacaatacggacagtatcgcggattccgatgccgtaagacccttacggcccccactcggctcctcaccatcgaccttctccgctagtgcgtaccgatcagggccgatttcatcggccagcctcgcttggaccaatctatgcaaaatcaccctgatgtcgtcggaatccagatacagcgcgacatgcaactgcggaaccgtcatatcgccatgcctcttcaacaagagcaacgccatacgttcatgacgagtcaaggggacgcccacatgatcaagccagtcacggttctcctgctgctccacgccgtagcgtccaagaacgaccgtgaaccgatcgggagttgcgcggaacacaggttcccccagtgcacgggatttcatctcgcgaatcaccagagggatgccggagccaccgccttccactgtcacatcattcgcatcgtcatacggtatctgatgaagcagctgcatcaacgtcgcattgcggcagcatgacacgccgctgccgatcgtggccagcgtgaccccaccccataatccgccaggattcgacacctccacccgatcggggtagatgtccacggtcacggattctccgaggaattgcgcatcatattccctgtgaaccacggcattggcgacgacctcgcgcagcacctcctttggaatctcgctatcggtacgggctccgacccccacgacgaacgtgggagcccgcaggtttttggcgatggcctccaccgcctgttcgattgcctccggcatattgccgtcgcattgcacacgatccacgaaacgcggaccctcaaccgccgatttctcgacacccggatgtgcgacgacgtcaatgatcagcttgggatagtactgctgcgggtactgtccggcggccaacagtcccgcaagacgcacctctccaaccttgttcaccatattcaatctggtcatgcgctcaagacgagtatcagtcccgcgcaacgccttggaattacgatgctcggcaagcaccctgtccaccgcctcggcattcagatcggagacgtcggcttcagggacaaccatacgatccgcggaactgggcgtcagggcatgggtcatttcgaacacttcggttggcgacaatctcaaatccttgtcgtccatacggcggtacccaccggtttgcggccctctcgccgtaagatagcagggtttgtgctgaatgccgttttcatggatgtcgatgaccaggaacgacaagccgttctgctcgcatcgggaaacgtcatactccggaggattcgtcaaccgtgctccttgcggattgccatctcccataccatccatgaactgcgatgcaatatggttggcgtcgaatcccggaacaggcgagaaatccccgtcctcgctgattcccaacaacagcacgccgcccttggtgttggcgaacgcgctcacactctcccacacgctggcgccgatggtccgcgcacaggatttcgcctcgaaacgggcgtcatcgttgccttggacacgtagatgttccagcacctcggcgatatcgtcattcgtccacatcatcatcccccttgatcagcttatttgtcttatttgttgcgaccacatggatccaagcagtcgcctccaatcgaccccgaacccacgtctgaaatctcatgataacgtgaagataaatactctgtcatgagcttatcatgattgcatcatgataagctcatgacatcaagaaccggtttatgacaagcggcacgaatacgcatgccgaacagcaacaggaacctgaacgcaagcatcaacatgtaaatatcgaaattggccaaaccgaaaaagaaaatcacgcacggcattacgcaaacagctaaactatctatagcacatgagcatgggccggaaccgggatgagacggcttcgaactgagtatgaggatgggaagatgatcttcgagacaaacacgcagaaagcggacatcacgagcgccggtggcgatggttccggcgagcgcgccgaccgccgcgaccagccggtcgtgtattttgtgcttccctgctacaacgaggcggaagggctcgtgcacacggccgacgtgctggccgccaaagtcgcacatcttaccgaaaccggacggatcagcaaacaaagccgcatcctgttcgtcgacgacggttccaaagacgacacctggagcatcatccgcaatctgcacgaacgcgacgcacacttgttcggcggcgtaaagctctcccacaaccgtggccatcagaacgcgctcctcgccgggctcatgaccgcgcgcgcctacggctgtgacgccgccatctccatggacgccgacctgcaggacgatgtgaacgcggtcgacgagttcatcgacggattctgcaacggcaacgagattgtctacggagtgcgttccgcacgcaagaaggacacatggttcaagcgcaccaccgccgaagccttctacaaggtgttcgagtggatgggtgccgagacggtacccgatcacgccgattaccgtctcatgagccgcgagacgctcgacgcgctcagcgaataccacgaagtcaacctgttcctgcgtggcatcgtgcccacactcggctaccagaccagcaaagtctactacgagcgcggcgaacgcgaagcgggcgaatccaaatacccgttgaagaagatgatcgccttcgcgattcagggcatcacctcgttctccacgaagccgctgagcttcgtcaccggcgccggactgctgtctatcctggtagcgattggcatgttcgtgtacgtgctcgtctcgctcgggttcggccacgccatcgccggctgggggtccatgatgatctccatctggctcatcggcggactcatcatgctctccctcggcatcgtcggcgaatacgtcggcaagatttatatggaatccaaacatcgcccccgttaccgcatcgaaaccacgctgtaggagggaccggcggccagcggacggcccctcctacagtgcttggattgtatctattttgtcctcatcatacgagtcaacgcgtatagcaatgccccctgcttgaggcgaaaatgagaccgtcgccgttctcctgccttgttataacgaagaggtgaccatcggcaaggtggtgcgcgacttccgtgcggcgctgcccgacgcggccatctacgtgtacgacaacaactccaccgaccgcacggccgaaatcgccgccgcgcccgacatagtcgccaaggtgctcgaaggctacgacatggtgatcggcgaccgcctctcctccacctatttccaagagaacaagcgcccgttccacaacttcggcaaccgcctcgcacgcggatccatcaaccacctgttccgcgcgcacgtcaccgacatcatgaccggctaccgtgcgttcagcttcaccttcgtcaaaacctatcccgtgctgtcacgcggcttcgaggtcgagaccgagatgaccatccactcgccgaacaacaacctgcgactctacgagatgccgatccagtaccgcgacaggcccgaaggctccgtctccaagctggacaccgtaggcgacggcatcagggtcatgagcaccatcttccgcatgatccgcgaatacaagcccctccccttcttcggcggactgggcctaatcatcggcatcgtcggcattgtgctctgcggcaccgttaccttcgaattcgccaagaccggcgtggtcacccacttccccacgctgatcggcgcggtgatgctggtcatcgctggtcttctgctcatcatcgccggcattatcctggatgtcatggccaagaatgaccgcaaaaccttcgtcctcgacaccaacaaaatcgcatacaacaagaggcactgacagcgacgtactaaaagatgggggcgcaaccgtgagtcgcacccccatcttttagtgtcagcccaaaccacaaaatatgaaggtaggtaaatcatttacctggtatctgccatgctttcttgaacgtcaacaatgacacccccactcatcttcagctggttcgaccacacactcaatacgcgcaccaacctcaagcgcataatcggtatccgtccacatacgacaagccgattgaatcgatataccgttctccctcccctaccattaagcatcctttcggagtccctcattatccttttccagccacaggtaccacaaatctctcataccttggataagcaaggatatttcccctctgatttggcacgcatcaaaatgcctttccagtgggaggattcgcgcatgctgtacgggctacagatgattgacatggctcttttcatgtgtggacgtgcgagcggcatcgatagcgccaagaaattaaatgacggagacaaagccgtgctaaaaatcgttgatgttattcgccctccatcataaatgtggacacgggttcaaggcttctcatcagatgaagtcatgctcatcaaacctacttacgcaacatccaacgccgggcattagtaccgttgctggaatagagctgaacgttggcaccattaatggtggaaccgttctccaaatcatacgtctaggacccttccagaactgccttcaaatatcgctcaatcaccaccaacacctcatatatatagtgggacatatgtctgatgcttccgatgcctctgatgctgtttctactccttcgaccgtgttctcacgagtggcggcgagcgctgcgtggaagcggctgaaccgtttgatgccggccttggcatgtcgaaattcacgttcaccccgcttctgctgctgggattcctggctttgataccgtggcatagcgccgtatccgaatctacagccgtaccttccgcagcagacgctgcacgggcttaagcaccacggtatcggctatcaccgcgaataccagcgccgccagcaacgtagcgccaaacatcagcacactgatacccgcatacgaccatccgttcgtcggcgtgggcatcctcgggccaatcagcaccttggacagcggcgagtgcaccaagtaaatcgtgtaggaatatccggcaagccaaataatcgccttacgcaaccgtgctgacgtaatgtgcacgtcgtagcggaaaaacaggaacaccgtcatcaccactatcgcaaaggcaaccgtaagcgtgcggccgacctgaacctgctgaccggtgaacagatgcggcgtggcgacggtccaggccaaggcgaatggtgccaacgcatacaaaccataccgtgcgcgtgcggaaggtgggtagtattccagcacaaagcccagcagatagtaaaccagcagtccacgccatgggaatgactgcaagaacaccagcggatatccggcaagattacagatttgttcggcagcggccacggcggcggccagcccgaccagcaaccaggctcccgatcggcctatcgtacgcatcatcgcggccaggaacggcgttgccagcacaaacccggcaagcatgaacacgaaccaatagacggaatcgtcatacccggagaacagatcgaacaacgttccagacacagcgccgccaaccgaacgatgatcgatcaccaggtaggcgacgaatcccatgccgcccgcatacagcagatacggcacaatcagcgagataaaacgtttgtagtagtagcgcacgtacggcgcgagactgctgggatcggcttggccggcaccgccgcctgcccgggcatcagagccagagcccggcagacggcccgacgagcgggtgctccccagccggccggcatcgaatgtcaggttgaaccggccggacaccatgatgaacagcggattgcagaccatgaacaacgcgaacagcacgaatcgcaccgtttctgcgctgccggcgagagtcatcttgacgggcatgtagttgttgatcacgtggacgccgatgaccaggcacatcgccaccacgcgcagcagatcgtagttcacgtcgcgcagcttgccggcgacgccggaaacggaatcgggcatggtcatcacatggatcccgccagggacttcagatcgaccgggcagctgatctggctcttcaacttgtccaaggcgtccaggccggccgaaggatcggaggacgcgtccttatgcgcgtcgttcttgccgccgtccgcgccgtcgttcgcaccatcggcaccgttcgcaccatcggcgccgttcgtatccgccgtgcactcatcggtcacattaccgttggagcccgtctcgacgccatccgcattcaccaccggcgtggttaccacgttcagtggatgtgtggcatcgctgctgacccgaacggtataagcaatcgtcaattcttttccgggctcgatccactgctggttgaacataatgtactgacggtcatacaggctcgcggtgttggtaccccatgaatctatatcagcctgcacagcggtgatctcgccaccgtacggagcggtaagcaccacgcggtacaacatgccgccgagcactggattctccgagccgccattaacgaaatcaggcaacgattcggccttagccttagtcagcgtgttcttcatggtgaaggtgaccgtgtattcgtcaccgagctgatcttccgtaaactgacccagatgcgtgttacgcacggctgtcatgatgcgcttatccagcacgccagaatacagggcgttctggctggctgaggcgtcgccgcaggtttttgtgaccgtggtggaggtcttcagataccaatcctgcttgccttgctgcagctccgaaagatagatgccggcttcgggcacctgactgtcagcagacaactcgccactggccttatcgtcgataagtccggtggcaatcagcgcctcctgctcatccggatcagccatccatagcttgaaatgaccgctagcgctggtatctctaattgccttcaacagcggggatgcggtagaggcattcgcgttgccaagcacatggttcataattgcttgagccgcttcggaaacgaaattgttctgctgctcgaagtccgggtaatccgtgtacaggtctgaagcgaagaacggcaccgtggtggtgctatccagcactcggccgtccgaaagcttgacctcgcctgtggctcccagcaatgcctggagaaatacgggatcgagtgacaatacacccgctacgttctcgtcttcgttgcctttctgatacagccacatgtatttgttcatctgtgccacacgctggaattcggggtcgatggtcgtggtggccgggtactggtcaaaagtgccaccaaatacctggcgctccttcagcaccgtatcatccattggctcctcaggaatgtcccaaccagaagtggtggcgaaatcaccgatggtaatcgtgcccttatctgccgtgattgcggcgatggtgcctaccatgccgcccgccgaacgtagctcggccgggttctgcaccatcaccaaatacgtgcgcttgccgtcctcgccaagcagttgcggtagcaagttaatgaggccatcgtattcgccgagcatcgaatccacggtcttgagcgcagccttttcggtttcgagcacggtggccaccttggcgacgctcggagtcggcaccttgttgagcttggtgagctgctgcgagatatccttatgcgcctgcttgacgatatccggcatatccatcagggcgctgacgtccaccgagccattcttcagggagaagccctgcaatcgtttggacaggttcagcagatcagtgaacggaccgttgaccagcgtatccacggaagccagcatttcgcgggcggcggtgatgtcgcttccgaatcgcgaatggtcgcggaagaagtcccactgtgggccgttcagctccgcattgagatcattggtggcattgaccagctcttgggagatgtccgacagactcttatcgctgccacagccaagtgccgaattggccagactttcggcggatgtcagcacgcgctgcgcatccgtggccattctcgagacggatgccgcgtagagcgtgcccacacaggtgacgctggccagcaacgtcagcagcagtacaaccaccactcgcgcccatatcggcgtacggctgatcagcgaacggccgttaccacccacgtgctggggagtcttcaggtttacgggacccgtctgctgattcacagcgctattcgtagatgcggagcgattgaattttccgttaccggcatgacgtcttctcctacgccccacagccttatggctcgaatgccctgaagtgaatcgcatacttaccctgcccgaaaatctgctcagctcatactcttatccagcggcgcgaggccacgcttccggatgccggactccgggcaaatccggaatcgcagacatgccggagcacacgtgacgccacgcatatctcatgccagtgtaccgatgccaccgaaatagaccgaggatttatcccataccgggtgcaaatcccctcatgaccaccacatcgctgtcagaatgttctcagacttcattgaggggtataacagtattgcgcaagaaaacggtcactaaacgcaacaatagttagagccgtattgatttgttcggcttaggagaacgggagaggtaattacatgttcgtcctcagcaacgcctggcgggccctgacacgttctaaaggacgtacggccctgaccgcgttcatcaccttggcggtcaccttcggcacagtcgccggactggccatcattcaagaagataccaacgcacacaccaccgcgtacgatcagcagaaggccacgttggccattcgcccgactgcggctacgtggaagaaggtctccgctacggactcggcttccaccaagcattacatgacgtggacctcatacaccgaatacgccacgctcgtccagtcggccaccaactcgttgaacttcacggttaccgaaaccgtgccggcccgcgtgagcggtgatttgaaggccctggacggcggatcgctgggctcggcctccgatgacgagaccggcggccagctcatttggcgagccttctggaccaaggattccgccaaggccagcgacctcggcaccttcgaaatcgtggacggcaaggacctgagctacaacaaccagtcctccaacccgaacaccaccggcgcactggtctctgaagcgtttgcctccgccaacaacctgaaggtgggcgatacgctcaaggtggcggccgcctcggacgccaagaccacggccaaactcaaggtgcgcggcatctacaagtacacatccgaatccgccgtcgccaatccggtgacggccgcccgcaaccgcgagaacgcgatcttcaccaactatcagaccttcgccaaggccggactcgacccacagtccaccgacaagaccgtctccggctgggcagtcccggatctggacgtggtgttcgacgccggtgattccgctacatacaagtccttggtatccaccctcaagaagtccaagctgcccgccaagggttacgagttctcttccccctcgctggaatcctacaacgcttctctggagccgctggatacgctatcctcgcgcgcgaagaccggcaccattgtgttggttgccgtgggcggcgtgctgttgctcatcctcgtgctgtcgggcgtgtgggcgtccaagcgtgacgacgagatcggcatggcactggtgtccggcgtcactcgcgggcgtttgggatggcagttcatgctggaagtgttcatcgtcaccctgcccttctacgtgattggtctggtcggaggcgcgttcgccgccaagccgatcggacctgctctggcatccggccatgccatcccggtgacatcggacctgatttggaccatggtctggtatggactgggttcaatcctgatcctggcgattcttgccgccctgcgccttgcgttcttcagcgcgaacaagctgtttgccgccgatggcgactggggcaccgtgagcgagaccaacaagacgaccaccacaaccgacgatgcggaggcacaggcatgagcgacaggaacaacgatcaggaactcgagaagaccactgacgcaacggctgacgaagtgacttctgagactgagacgaacgacgccattgaatccgttccagctgactccatgcagttcagcgtgaccttcgatgacgttgatgacgaaggcactgttgacgatggtatttacagcgcactggcatctgccgaaaccggagaaaccgacgagaccagcgaggccgaagcagacgccatcgcttcggccaacgcatccgccgaagtgaccgagcgcaatgccgcccgcgtcaacgaaacacttcgactggccaaaaccgatcacaaagacgcattggccgagcatgcggagcctcagggcgaagcggccgaacccaccatgacactggcctcgcgtatcgatcgcgtgttggtgggcggcggttccgacgacattctgctcaagacctacccgaccttcgccctgaacaaggtgacggtcgccggacccaagggcaaggtcaacatcctcgatggcgcgaatttcttctgctattccggacacgcatacgcgctgctgatcagcgacgaccccgattcgggcatcaccgccgacgccaagcgtcgcgcgctgatgggcgtgatgagcggtttggccacgccggcgtctggcacggtgatgaacaagagcgccaacattgttgagctcgagcccgtggaactgcgcggccaccgtctgggcatcgtaccgcagctgcacgccgtgcagccgaagctcgacgccgaacaaaacgtgctgtacgccatgaatgcgtccaaccgcaacttcctgaagcccaagccggtaatcgcccgcgaactgctggccaaggtcggcttctctgaggccaccagcggcgtggccgtcggcacattgcctttggtacagcagcgtttggtggccatcgcccgtgcaatcagcaccgaagccgaagtgctgatcctcgacgagccgacacgagggctgaacgcggatgacgaggtgaccgtgttcgccgcgctggccaagctggcgcacaccggtgacccgaagcactgcgttatcgtgctcactgcgtcgcgcgaaatcgccgaagcagccgacacactcttcgaaatctgatgttcagaccatagagccccctgtgattcgtattgccgaatcacaggggtttttcaatgctgcggctcattgccgcgctaatctgaggataaatctgaccgtacgaggcgaaacctgataatcatgaccggatatattcccacgctggagcagatcgacgagttgcaccgcaaaatcgcgccgtccaaggcggcgtacgagctggtgcacacgcattgcgtgattgtagcgaccatcggctgccagatcgtgcgccggcagaacgcgctgttcacgcgccgctgcacattaccgaaggacgcggaggtaccgcccaccgcaggcgccaccggcggccatgtgccgccgcgtctgctcgacgagcatttggtactcatcggcggactgctgcatgacatcggcacctaccgcgtgttcaagcatgacggctctgacggcgaaccgctcaaattcagcaagaaacgctacattctgcacggtcttaagggctacgagtatctgctcgacgagggcgtggacgagtccatcgcccagttctgccgcaaccataccggcgtgggacttacgcgcgaggatgtggtgcgccaggagctgccattgccaccagccgactatgtgccgatgaatctcgagcaggaagtggtgatgtacgccgacaagttccatagcaagtcagtgccgccgaagttcctgcaggtcgaggcgtatacggcccgagccgagcgatttggcggagagaacaaacaacgatggctggatctggtggccaagtatggcgtgccggatattccggcgttggcggagaagtatgggatgcggatgatttgaggctctaggggccccccagtcagtctgtcggctgacagcccccctcgtcagagggggcttatgaagctatttcagatggaacggagacggtaggtgccgttgcggttggaggcgatgatcatctggtcgttctccagcacgttccagccttcctgctcgtagccggaagaggagaccaccacaccggcggagtcgccgttgtcgtcgcgcagctcacggtagcgcatcacacggtagtcggcggcctgctcgccacggccgtactcatcgtagatttccacgatgcgcgggctggtcttctcacgaccggcggcgcacagggcgatgagctggtcctcggactgaatcatgcagttgtagctggacttcgggtaggcttggcgcagttcgcgcacggcctgggccacggcctcgtcgagcgagaagccgaagccgatgtattccagaatcaccgcgaagaagatggcggagtcggaacggccgccggtggagaggaacacgctgtggttcaccgggtatgagcggttggtgacgatgttgcggccattggcgtccgagatatcgccgttgtggatgaagctcaggccgttcgcatagaacgggtgctggttctccatgatgagcggcagattggaacttgccaagcgcaggtgccagatggcaccgcgagacggttcgtcggccagcgcctcaaacgtgctgtcatgacgggccgcgatggtcgacttgtagattcgggtgccggtttccggggtgggtgcgccaccgtcgcgcacgtgcggtgcttcggcaggatcggaaagctgggctacaccccagccatcattgtggatttcagacagttcacggaaatcctcgacattgtcttgccccaacacagcgttgagactcaggttgaagcctgccgtcgcgtatcccagtaatctgcacatggtatttcaacttaccgaaaccgtgtggcgacgtgcggcgaccgttataggcattctttatagagcgcatcagcgccgctgcaaactggtatgttatcgcttctgtttggcggagcgctgaggcttggcggcgggtttgccgttctcggccttgcccttatcgcccttatcgccctgctcagcgggcgcatcggcggcagcggcctcagcggtcttccgcgcctcggccgatacggcggcatcgagctcctgtaccaatcgcccaagcccggacgtggtgtccatcgggtcagggacggcggccgggtcggccactgcacgagtcggcgtgggcgtcgggatggtcttggccgtatcggtgcgcttcagacgcggtgggcggcgggtggagacgaacagcggctgcacctcgaccaacgggttgtaaggtgccagaccgaaccacttaaccggcgagccggccatgtggcggattgcgtacttggcttgcaacgacagggcaccgcgtgcagaaaccttggattccggcatcagggccttgtgaatcagcacgtaacggatggtgccgatgtccggatcggcgtcgaccttggggtaaatcgacttctgcttgggcagttcgccggttttggacaggtcgtgcatgatctggtggatgtacgccgggatggactgcgaaaccttgaatcccagacggaagcgcacgcggtagatgtagttcgtgccgaagtcctccaccgagtattcacgggtgaacggctcgtcggtggtttccacgctgactgcccaccaagcacgggcgcgcttggggtggtcggcgaagatggagaagaagatgtccgtgtcgagtcgcttggtttccgagtcggaggtcaggtacacgatgttgtccgcaaaatacgggatgcggaaatcactgtgcagcttgtcgagcgcgggtaggaagtcgttgggccgcatgtgacggcgttgcgcacgttcgagcttggtgccctcattccacgtgtacatgacgaacagaatcgcggcggtcagcaacatggtgaaccaaccaccatgcaggaatttggccatagacgcgatgaagaacatagcctgaatcgccaagaacagcacggtgaacacgatggcaccgacccgcttgccggaatgccataggtggacgccgagcaacacggtggtggtgatcatcgtaatggtcaacgccagtccatatgcggcagagatgtgttccgaatccttgaagatggcgagtacggccagcgtggagacgcacagcacgccgttgaccaccggaatgtacagctggccacgcgtgcgggccgggtaccgcacctgcagatgaggcatccaattgaggcgggtggcttcggagaccatggtgaacgcgccggtaatcagggcctgggaagcgatcacgccggccgaaacagacagaatcacggccagataacgtacgttcggagacatcatctggaagaacgggttgagtgactccatcgcagtgtattgcgggttatcgctattggccagcatccacgcaccttggccgaagtagttgagcaccagcgcaaccttgatgaatggccaagtgaagtagatgttgccgcgccccacgtggcccatgtcggagtacagcgcctcggcaccggtggtcgagaggaacacggtgcccataagggcgatgccggcagcattgttcgggctgaacaggaatttgatgccgtacaccgggttcagggcctcgaacacagaccagtcgttagagagattcgtgacgcccacgatggcgaggaagccgaaccagaccagcaccatcgagccgaatactttaccgatgctttcggtgccgcgcgactgcacggagaagagaatcacgatgatcacgacggtgatcatcagggtcaggcttgggttttcgtcgaacaacccttccaatggcggcagggtctgcaagccttcgactgcggaactgatggaaaccgccggggtaagtaccgaatccgcgaggaatgccgcgccgccgagcatggcgggaatcgcgagccatgcgccgtacttgcgaatcaacgagtacagtgcgaagatgccgccttcgccattgttgtcgatgcgcatggcgatgagcacatatttgacggtagtgatcagcgtaatcgaccagaagaccagcgacagcatgccgagcacggcctctcggtctacgctgccaagccctccctgaccggcaaggaaggtctgcgcggtgtacaagggcgaggtgccgatgtcgccgtacaccacgccgagcgccacgattgccatgccccaggtgaccttgtctgggctggattgcaggcgggcccaccatcgaccgaggccgcctttcgaccatgcgctggcgattttctcggcttctttggtttcagcttccctctgcttggcgagtgcctcgcgctcctccttggtgagagtgcggcgggacaccttgggagcgttggtaaaggtgtcggccctcagcagtgcttcttcttcctgtcgggccttggctttggcggcaccagactgggctttctgggcctttgaggctttttgggcacgtgcggtcctttggttcgactcagccatacgttcagtcctccattgaggtggagatcatccccctcgcttatgtcaaacacatcatgatagacctcgttcacaattctgacaaattttacaagtcaacacatcgtctctacacgcgccgcgacggccgcacacccggccctcacagtccgtatacggcgcgggcggtatcgcgggtgccgcgcgccacatccgcgatgggcaagtcgagcgtatcggccatggcccgcaaggtgtagggaatcatgtacggcgcgttggtgcggccacgatacggcatgggcgtcagatacggcgcgtcggtttcgaccatcgcatggtccagccccacaatccgtagcgattcgcggataccgtcattgcctttgtagctcacggtgccggagaagctcagataccagccatgttcgcgcgcgatctcggccatctcacggtcgccggaatacgagtggaatacggtgcgttcgggcgcgccgtcggccagcagggtttcgatgacctcgcgatgggagtcgcggtcgtgaatctgcatgggcaggcccagttccttggccagggcaatatgcgcgcggaaagcctcgcgctgcagttccttggcaccttcgccggtgcggaagaggtccatgccggtctcgccgatagccaccacttgctcggggtatgtggtggcgaggcgatgtacttcggcgagtgcgtcctcgaaagacgtgtcatggtaaggcttgtatttgaggggcagaccatccggccccggcacaccgcgatgcccgtggagcacggactcattggggtgtattgcgagcgccgcgtgcacattacccggatgatcgagggccatctggacggcggtcatcaggtgcggcagctcgcaaccgcagtcgataatacccccaatgccgacagattgcgcctgcgccagcaattggtcgacgtcgtacaccgggacttcgggctgtcccttctcctgcgcctcatggctcatagcgcgcgcgaaagggattacggaggccacgtgagtgtggttgtcgatggtctgggcatcgtccggcaatgcttcaggtgccggagcccagctacggtcgcgatggtggtgcttgctcatggtttctcagtgtaggctgtttctcagtgtaggctaccgccagcaacgctcgtaaggcagtccggtaagacgttcgactacacgacgggtatcgtcggtcacgcccgcctgaacttgccgtttcttgccacgagcgcaacattcccgggagagtagcgcaaccggcaagcgagacggccgccatcctgccgcctttttctgcatcatcagcccattttctgcctcattttgataaaatatgatgcagaaaagttcgtatgatgcagaaaatgaggcagtatgagatcatttgactacatcgaatcaggtaagacgttgctcaccccgcacaccacgagtttgcttgccgctattcacgaggcaaaagggcgtcaaagcatacagacaacgatcagaccggatatattggggacgctggttgccgtcgcgcgcatccaaagcacagatgcctcaaaccgcatcgaaggtatttctaccagcgatagcaggctcaacgatctcgtctcggagaaagtcacaccgcgcaatcgcaatgaagaagaaattgccggttaccgtgacgcgctatcggttattcacgaaagccacgactatattccgattaccccgaacgtcattcttcaactgcaccgcgacctcttccgacacacaccactgacctttgcggggcatttcaaggacagtgacaacgtcatcatcgaacgagatgcacacgggaccagcaccgtgcgattcgccccaccgtccgcacttgtcacaccggaactaatcgaacgcgcgtgttccgcctacacgcaagcaatccgagatggacataccgatccattgcttgccatcgccatgttcattctcgatttcacctgcatacatccgttcaatgacggcaacggccgcatgagtcggctactcacgctcctgatgttgtaccgcaatggctatatggtcggcaaatacatcagtatcgaacaccttatcgagcaaagtaaaagcacttattatgaggcgctggccgcaagcacccaaggctgggacgacaacgccaatgattatgcgccattcacgaactacctgcttggcatcatactgtccgcgtgcaaggaattcgacgaacgcatcaatctcacggcaggcggcagagcgcagggagcaccgcgagtagccaccaagggaacgcggattgaagcactgcttgatcaatccctagttccactctccaaggccgatattctcgctcgcatgcccgataccagcaccaccaccattgagcgcacgctgaaatcactgttggactccggtacgatcatcaaaatcggtgctggccgcagcacccgctacgtgaaacgccgctaaacgcaccatcgtgcgcaacattcccgggaaagtgttacgaatccacccacacaggcccaatctgcgacacaatcccgggaatgcgtcgccattccaccgcggaccgagtttggtcatgccgatgccgaacagcggcatcagcggcagcgaaatcgccgcgcaacccagcaacagtgaggcgaacgcagccgtatgattccagtcgtacaccacgaagaacacgaaggtctggccgaatatgtccatcgagacctgcaccaatacagtatttcaacctaagacttaccaaaagacctttgcggggagcctcgttgcctcaaccggagaatcaccaaacttcaaccacatatttcacatacccacaaaaggccgccaccgcgggaggagccacggtgacggcctgccccggcgccctgtacaagcggcgccggagacggtgatgaaaggaaggagggtacgtgtagtaagtgaagcgaacgatcgcgcggaccggtgcggacaggagacgaacagactcagccggccgcagccagtccagccagtccagccagtccagccggcccagccaggcacaagccagcccacccggcccgcgcgcgccgtttacttcatgccggtcatcgcgatgccttcgacgaagcgcttctgcacgaagaagaacacgatgagcaacggcagggcggagatcagcgcgccggccatcaccacgccgtacggcgtgacggacgaaccgtgaccggtcagcatggccagaccggcggtgatggtgcgggtctccggcttggaggtcatgatcaacggccagagcaggtcgttccagttgcccatgaagttgaacatgcccacggtcaggatcgccggcaccgcgttcggcaggatgatctgcgcgaagatgcggaactcgcccgcgccgtcgatgcgggccgcgttgtcgaggtccttcgggatggagatgaagaactgacgcagcaggaagatgccgccgacatcggccatacgcgggatgataatgccgaggtagctgttgacgaggcccatggagccgaggagcttgtagaccgggatgagcagcgccatggccgggatcatcatggtggcgatgagcacggcgagcaggatgccgcggcccttgaagtccacgcgggacaggccgtaggcggcgagcgagtcgaagaacacggagatgaccgtgaccgcgccggcgaacacgatggtgttgagcagctcgcgcccgatcggcaggcgctggaacaggctcgtgtagttgtcgagcgtccacgcgctcggaatgatcttcggcggccaggtctgcgtgacggcgttcggcgtgaacgagacgatcacgacgatgatcagcgggaagatcatgaggaacgtcaccagtgccagcgcgacgtagctcagcgtcaggctgatggtgcgcttggcgcgcgcctgcttgcgcagacgttcgttttcggcgttgatgcgagcgttttcggattcctgttccgcggtcagtttcatggaggttgcggttgcggtgctcatgcgatctcctccttctcatgcttgttgttggtgtacagctggatgaggccgacgatgagcgtcatgatgagcagcacgtacgacagcgcggacgcgtagccgagcttgccgttgccgaacgcctcggtgtagatgcggtacacgatggtttcagtggaacgggccgggccgccggaggtcaggatgaagacctgatcgaagacctggaaggagccgatgaggccgaagatgaccacgtagttgaaggtcgggcggagggccggcagcgtgatgtagcggaacttctgccatgcgctggcgccgtcgagcgaggcggcttcgtacagttcggcggagatgccctgcaggccggcgaggaagatgaccatgaagtagccgaagttcttccacacggtgatgaagacgatggtggccatcgacgtttcgcgtgtaccgagcaggtcgaggtgcgacggaccgccgagcagcgagacccagtacgggatgagaccgagggacggggagaggatgaactgccatgcgatcgcggcgacggtcagcgagatgacgaacggcaggaacatgcaggtgcggaagaagccgacgaacttgaggtccttgcggttgagcagcagtgcgaacgcgagcgcgatgattacgacgatcggggcgtacagcaccgcgtagacgagggtgttcttgacgtcggtccagaagtcctggctctggaacagcgtgatgtagttctggaagccaatgaatttggcgggtcggcgtgcgttggaattgatgcggccgttggtcagggacgtgatgaacgtctggatggccgggtagaagacgaagatggcgaggacgatgagcgcgggcgcggtgaacaggacgccggtgcgcaggttgcgcgcctgaatggccttcttgttctccttggcgacctcgtgcgcttcgccttgcgacgttgctgtggtcattttgctcctccaaaaggacacatgattggttgtcgggaatggaaacgttccccttccctttcgggaattggctgggaaggggaacgtcggtcagctgctgtcagctatgcgtgggattgggttgcgggttgccgctcactactcggcgtactcgtcgaggtagcccgagatggagctctcggcctggtcgagcagaccctggatgtcgtcgccggtgcggacggtgttctgggtcagggtgtcgagggaggcggcgatgtcgccgaagccgcccttgaggccggcgatgccgatgtaggagttgtcggtgtactgcgagatcttggcgatcagcggacggtcggacagctcatcggcggtgacggtcttgttgttcggcgggtaggcggagccgagggaccacttcacctggttgtcgtggttgttgtagaacttgaagaactcgtagatgccgggcagcttctcggagtcgccgacctgcgaggtgacccaccagtacaggccggtggagccggtgttggagccggtcttgccgtcggcgtacttgtaggtgccgtcgccgtccggaacggcgaaggtgtcgtggttgatgcccttgtcggtggccgcctggtcctcccacgggccgacgatcaccattgcggactggctggactcgaaggattcgcgggccgcggtgtcgtccagacccgggacggcgtagccgccgttgtagaagtcacgcatcttctgcaggaaggccttgttctccttggagttgatggagaccttgccgtcggtggtgtacaggccggtgccgttgcccttcatgtaggcggcccagccggagtcggccatcgcgaggccgtactgcgaaccgtcggacttggtgagcttcttggcgacctcgaggagctggtcccaggtggtcggaatgtccttgtcggtcaggccggcggccttccacatgtcggtgttgtaccacacggaggtcggcgcgtagcccatcggaacggcgcacttctcttcctcgccgtcgatgttgaaggtgatctgcttgacgacgttgtcgaggtagtcgccggtgccgttgttcttgtcggcgtagaaatcggagacgcactggaaggtgccgtcgatggaccagccctggccgttgtcggcaccggtggtgacgaagtccgggccgtcgccggtggtgaccttggtgaccatcgtctcgccgatggtgctccacggctgcagctgggcgtcgatctcgtacttatcctgggacttgttgaagtcgtcgacgatggattccagcgtcttgccgtcggcttcggagaagccgtgccacatggtgatcttcaccttgccgtcggcggtcttctggacgtcaccgctgcctccgttgctggaaccgcagccggccagcgccatgccggccgcaagcacggccgccgtggccgcgacgaggttcttcttgatcttcattggtttcctccttggtactccggtttcccagaaatcttggtcgttgcatgcgggcgaccctgtggcccgccgtctggtgacggtgttcggttgacgacaacatcgttgtgcaacttgcgtggttgataaaccttggttcgtggagcctcagcgctcgtttacaacgttggaattcactataacacgttttccatcgttgtacaaatcggatgcgcaacccgttcgacacgcctagaaaaccgctgttttccgtacgaggcgccggacttcacatcgatgaaaccgacgtttcacacacgtcgaatgttctgttatgggattgatggacgacggccgtcgcgcgaacgtcgcgcacgttacgcatgcggtgcgcgtgacctgcgcgacatgccgcaccacgaccgccgctgcgtacgactacgcctctgcggccagcccgaccgccggggtgccggctttcggaccgccgtcgggcggcagcacgtcggtcgtgacgggcgtccacaggttgtccggctcaggcacgccgaagtcgggagtgccgtcctcgttccagcacaccacgccgacacgggcgtgacggttcgggtcgaacagcggatcgcctttgatttcggtgtagttgcgcgcgtggtagatcatcagatcctcggagtcatcctcggacttggtgaacgagttgtggccggggccgtactggccgttctcggagcaggtcttgaacaccggcaccgggctcttggtccagctcttcggatccatgaggtcgctgccacggtcggcggtcagcaggcccaccgcatacggcacgccggtgccggacgcggagtacgtgatgaagatcttgtcgtcgtggaacaggaacgccggaccttcgttgacgaggaagtcgatgcactcccagtcatactcgggcttagtgagcatcaccggatcagcggccagcgtccacgggttcgccatcggggcgatgtacaggttggagttgccggggatgtcgtagtccttctgcgcccagacgaggtactgcacgccgtcgatcacctcggtggtcgcgtcgagcgagaacgagtccatcggcgtgacgatctggcccttctcgacccagttgtcggtggtcgggtcggcgtcggtgttctccagcacgaacatgcggtgggtgggcatgccgttcggctcgaactcgtgttccgcgccggcgaagtagatgtaccacgcgccgttcacgcggtgcagctcaggagcccagatgtacttgctgcatacgccggactcatgcttgcgccagaccacggtctccggggccttctgcaggtcgttgatcgtcgaggcgtgacggatggcaatcttgtcgtactcgggatcggatgcggtgaaccagtattcgccgtcgaccttaagcacccacggatccgcacgctggagcacgatcggattgttgtaaacagtcattgtttttttccttctccaatccaagtggctcagtatttacatcgatgcaatatagcagatgtacaacgatgtaacaactcggcgtttcccgcccccgccaacgcacactccacccaaccaaaccatccctctcatcctccccaacggacatacagccgattccacccacaccgcccacatcacccgcaccacccacaccgaattacaacgttataatgatggtgcgcaacgatcagcgttcatcattcgaagcgaaggagcatcatggacatcaaaccgtgggaatacgccgattttccagccttcaacgagccggtccccggagcgacgcgtgtccccaccaccggcgacgagatcggcgtgacataccatcccgacgtaccctacgcaaccgccggaaccacgaccctgcacctgcagatcctcgtcccgcagacccgcaaccagaccgacgtcaccacctacccgtgcatggtgcacgtgcagggatccgcctggatgaagcaggaccgaacggcactcgtccccacgctcagccgcatcgcggagcgcggcttcgtcgtcgcgatcgtggaataccggcattcgggcatcgcatcgttccccgcgcagatccaggacgcgcgcaatgccgtgcggttcatgcgcgccaacgccgcgcaataccatgtcgacgccgacaatctgttcctctcgggctgctcgtcgggcggtcaggtcgcgctgctcgcggcggtcgcgcatgccgccgaccgtaccgacatggacgacacgtcgctgtcgctggtaccgaacgccgccgacgtgtcggatgcgacgcggggcgtgatcgactatttcggcgcggtcaacggtcagatggacgacggcttcccctccaccgtcgaccatcatctggccaccagtccggaaggcatgatgatggggcacgtcgacctgcgcgatcggccggatctgcgcgcggcgatgaccgtggaatcctatctgacgccggaactggcgctgccgccggtgctgatcttccacggcaccaaggatcggctggtcaacgcgcggcagagcgcgagcctgtatcggcgactgcgggacgtcggcaagtcggccgaactgtatctgctcgaaggcgccgatcatggcggcgcggaattctggacggacggcatgtgccgcgttgccacggacttcatgcgctccaactgcgcgcgttgacgctcggctgccgtacggctgcgcggacattcccgtacgaacgtacgacgacgagacgacggcggcagtgcggtgtcgtccaaccggtgccgccgccccgaccggctcggctcagaacgtgcgggtggagctgcgcacgaccagcgtggacgacaccttgcggaagatgggatccgtcgagtcgccttccagcggcggctgcccgtcgatgcggttcttcagcgcgcgcgccgacagccgtgccacggcctcgagccccggtgcgatcgacgtcagcgccggcgacaggtactgcgaatcgtccgagttgtcgaagccgatcaccgaaatgtcctcgggaatccgcaggttgtgcatctggatcgagtgcatcacgccggaggcgagcatgtcattgagcgccaccacgccgtccggccgtacgccggagtcgagcagcgtgttcatcgccgccacgccgtcgttgcggtgccacatgatcgacggcaccacgagcgccgggtcgaacggcacgccggcctcctccagcgcctcgcggtatccgcggaatcgcaacgcggccgagccgacctcctcgcccgggtgcacgccgaccacggcgacgcgcttgcatccggtctgcagcaggtacgaggtggcgcgcttggcgccttcgacattctcggtggcgatgtggtcgaccttgtcggtgaagatgcgttcgccgatgagcaccagcgggtagtccacctcgacttcggccgcatcgtccggaccgagttcgagcgggctgtagatcaggccgtccaccatcgcggtctgcgaaccgtgcagcgcgtccagctcgccttcgcgcgagtacaacgttggttccacgatcacacgcaggccgagctttttcgcctcggtgatgatcaacgatgaaagctgcgcgaagtacgacagctgcaggtctgggatggcgagcgcgatgatgccggtgctgccgcgacgcaggttgcgcgcggacacgttgatgacatagccgagctcgtcgatggccttgtgcaccttcgcacgggtggcatcggagacgaattcgtagtcgttgaccacgttcgacacggttttgatggagacaccggccgccttggcgacctcgcgcatggtgacgacgtgatcgccgtccttcgcggttgttttcttgaccatgggtaatcctcagtattctgttctcggtaaatagcggcttacgccacgtactgcactgcacgttggcggggccggagagccgaaccccacccccgttcgccgccgtatggcggctttaccgcacggcgatttccatcgttaccccagcataagcaggattgagttcctcgtcgcgctgcatgtcgaggatcggcatgccctcgcccgaccagtggacgcgccgtacctgcgcgtcacgcccgccgtatcgcccgttgtcgtactccgcgttgtggaatacgtagatcaggttgccgccctcgtcgtgcgaccacatgccgtggccggtgcccagctgccattcaccgttgtacatgccggatttctgcagcgggtagtcgagtttcgtccacgtggccgggtcggtcaggtcggcgcgcacgccggccggcgcggtgaccagtccggtcgtgtagtcgatgccgacgagcgatccggagtagatcaggaagatctttccctcgtgcacgaatgcgttcggcccttcggcgatcatgttgtcccacgcgaattccggcacgacgatctgcgtcggctcgccggtcagccgcgtcggccggtccgggtcgaacggcgcgatccatacgctgccaacctgctgccacgcgtagtaccagcggccggagtcgacgatcacggtcatgtcgagcgagatgcgctgcaccgggttgaggatccgttcgccggggccgaggatcggctcgggaacggtccagttggcggggtcgcgcgggtcgaggtcacggccgtcggcatcctgcctgagctgcatgatatggcagcgaccggtccacatgtcgggtttgccggcgcggtcgttcgcggtgccgtccggatcggcggcggggccgtcgaagcacggcatgaacagcacagacagcttgccgccgatcacgtgcagctcgggcgcccagaagcagccggtcatcgcgcggccttcgctgttgcggtcgccgcgggtgagcaggtcgatttcgcggtcgcggccgccggcggcatccgacaggtcggcgatggacgtcgccacgcgcagcggcatgtgcgtgcggccgccgttcggatcgacgcagttgccgtcggtatcgtcggtggcaatgaacatgaagagttgttcaccgttgtaattccatgcgaacacggacggatcggcgcgttcgacggcgaacggcacgggatagtcggtctgacggatgcgaccgcggaccgtacggcgttcgcccggcttgagcctgccagctgcggcgtcgtcggcgagggcggcgagctgtgcggcgtcccagtcgacggcgcgcatggcggtggatccgtcggagtactgcagtttggccgtggtgcggccgagcgagccgatgaggtcacgggcttcgccgtcgtacagatcggccgagacggtcatggacggcacggtgacgccggtgttgtaaacgcggccgaagcgtgcgatgagcgtcgcggcttcctgttcggtgatgtcgatttcgttgccggggacggcgtccgcgatgccgtagtcgcgacggacggacgttgcgttgacatcgttggcattgcttgcggcaatcggttcggaggtatcgtccggttcggccggcagcgtggtgccgaccgcggcgatgatgtcggcgcataccgcgcgcatcgcgtggccgtcgtcgtcatgccaccggatgacgtaccgacgttctgcatcgttgtatatgaccgtgggacggtgtacgccggacgtggggccaagcagcaccagtccgcgctgatcgtacgacgtcaggtcgcggctggtcgccagcaggaacgccgaccgttcggatccgtccgcgccgccgccgcgcgcggtgcgggtcgccgccacggcgaaccggccggacgccagccggaacaggtgcggatccttgaggcttttgagttcgatgtccacgccgggcatcgccgcgccgtgcgcgacggcgtcgctggcggctcgcaccgtcgtgtacggatcggtcttgaatcgtgccgccgcggtgcacgcacgtcgggattcgggcgtcgccgcggcgatcggcacgccggcagcgaagaagatgccgtagttttcgttaagcggcgtccacgagccgtcgagatgcgaccgcagcgccaggtgcatgctgaaggcgatgtcctcgttgttcgcctcttcgcgcgacgtggggacacgcgtatagcacagcagtgagtaggagtcggacattccttgtccctttcggttcgacaattcatttacgtcgatgtatagtatatcccagtttacatcgttgtacaaacgcagtgctgcacaacaccactgtcacacacaggaggaacacatgaccctcaccggcaccctacgcaaggcgttcgccaccacattggcggccgccgtgctcgtcggcacgctggccggctgctcgtcgaacgccaactcgaacgcatcgtcgaacgccaagaactccagcgactccagccagaccagcgccaccgagatcaagcgcggcgaatcgcacgatccatccatcgtcaaggccaacggcaagtactacatcttcgggtcgcatctcgcctggctgaaaagcgacgacctcgtcaactggaccagcttcaaaaacaacctgagcaccgactacgagaagatcttcgccgacatctggaccaactggtcgaagcaatccgccaacccggacgtcaagggcaacatgtgggcccctgacgtcatctggaatgcaacgatgaaaaagtggtgcatgtacatgtcgatcaacggcgctaactaccgatcggcaatcgtgctgctcaccgccgacgacatcgagggcgactggacctacgtcggcccggtgacctactccggcttcgaaaaggtcaacgcctccaagaccgacgtctggaaggtgctcggcgaaggcgccgacctgacgcggtacacgtcgcagaccgacaccggcatcaacgcgatcgacccgtgcgtcaagcaggacgacaacggcgacctgtggatgacgttcggctcatggttcggcggcatgtggatgttcaagctcgatccgaagaccggcctgcgcgactacagcaccacgtaccagacggtcaagaaccagtccgacgcctactacggcatcaagctcggcggcggtttcggcaactccggcgaaggctcgtacctgctgcataccaacggccactggtatctgttcgcatcctacggcaacctgcagcagaccggcggctaccaggtgcgcatgttccgcgccgacaagatcaccggtccgtacatcgatgaaaacggcaacgccgcagtcagcgagcgcgccatcggcaacaactggcagagcgaggtcggcgtgcgtctcatgagctcgatccagtggagcggcaacgacaactcgcacatcgaagtcgcgcagggccacaactcggcgttcgtggacgacgacggcaccacgtacatcgtgtaccacagccgcttctccgacaccggcgagatgcaccaggtacgcgtgcgcgagctgctgccgaccgacgacggctggctggtcgccgcgccgtacgaatacaccggcaccaaggccgccgacaccaagtacgacgcgaagaacgtggccggcgactacgagttcgtgatccacgaccagaggacctcgttcaagggcccgaagaaggtcaccgacaagcacagcaccgactaccgcggcgtcaacaagccggtgaacatcacgctgaccgaggacggcaaggtgaccggcgacaagaccggcacgtggaagctcgacaagtccgacggcaccggcgacatgaccatcacgctcgacggggtggagtaccacggcgcattcgacaggctgccgcgcgacaaggacgaccgcaaggtcgagatgacgttctccgtcatcggcgacaacctctgcgcctgggcctcgcagaagtagtcctttctcattgccgcccttccctcgcgccctcgtcctcgcccttccctttgaaccaccccatttctcttaacggacttacagccgatttcaccggtgaaatcggctgtaagtccgttaagagaaagacatcatgtatcacaaagaagctaacccatgaccgcaaccacctccacgaccgaacccacgaccgaatcgcccgccgatgaacgattcgtcgaacacccgctcgccccgggccgcatcgccatccacgacccagccatcgtcgaggacaacggtacgtactacgtcttcggcacccaccgacgctgcgcccgcagtaccgacctcgtccactgggaacgcttcgagaacaatctgacgcgcgacccggcctcgctgctcggcggcatctgggaggcatggccgaagcagccggagaaccccgcgctcgaaggcaacacgtgggcgccggacgtgatctggaacgacgtgatgcgcaaatggtgcatgtacctgtcggtcaacggtcacgaattccgttcggtgatcgtgctgctcaccgccgatcgtctcgacggcgactggacatacgtcggtcctgtcgtctactccggtttcaacgttgacaatgtgggccgcaccgacgtgccacgtgtgctcggcgacgaggccgcgcatggcgatctgtcacggtatgcatcgttgaaggatacgcggatcaacgcgatcgacgccgcgccgatccgctgcgatcacggcgaactgtggatgagtttcggctcgtggttcggcggcatctggatgttcaagctcgatccgaaaaccggtctgcgcgactacagcgtgcgctatccgctcgtccacgattccgccgacccgtactacggcgtgaaggtcgccggcggctactggaactccggcgaaggctcgtatttcgtgcaccgcaacggctggtggtatctgttcatggcgtatggctggctcggccgcaccggcggctaccagatccgtctgttccgttcgcgcaacctcgtcggcccgtacgtcgaccagaacggcaaccccgcgatctccaacggtgaaatccccgacaatcagaccaaggacaccggcatccgactcacgtcgtcggtgaaatggagcggcggaccggccgacgacgatacggtcgaagtgtcacagggacacaattccgtactcacgcgcggttcggacggccgactgtttctcacgtaccatacgcggttcatcgaccgcggcgacgaggattacgagacgcatgtgcgcgagctgctgccgaccgcggacggttggctgacggccgcgccgtacgagtatcgcggcgcggcagccgtcccgccgaccgccgcgaacacgtccgatccgaccgtcggcgacgacgatgacggcttcgacgattacatcgttgcacccagcagtgcgccgaacttggccgcccggctatgccactgcgtccgccccgtacacgaatcggatctcgcacacccgtcgctggtgtccggcgactacgaattcgtacgtcacgatccgcacgcgtatttcaacggcacgcgcaacgcggacggcacgcggcatggcgtgaatctgcccgagacgatcacgctgcagccggacggccgcgtgaccagcggcggcgtggtcgacttcttcgatacgccggacgcgaacctgccgcgatcgaccgacggccccgtgtcgcgaggatcgtggcggatgctcggcgcgacgccggccggcgtgcactgctgcgacagcgacatggcgatcacgatcgacggcatgacgtacaccggcgtgttcgccgtactaccgagggagaccgatggccgggcgacgctgacgttctccgcgatcggcggcaatcaagcaatctggggcgcccgcatcgagggctgaaacccctttctctgttcccttccctctgacggacatacagccgatttccgtatccgaatcggctgtatgtccgttgagaaagcgaggggaacgatatcaggctgcacgacggatcggcacgttgatgctcggcacggttgcagccgcaacgggctagagctcgacttcgggcttggtggggtcgtccttggtgcggcgcttggcctcgtccggatcccacgtcacatcgtcgtagtaccgcttccactcggccccggcgaccggcgcgatcgccgcgaccgtccttactgcggattccggggcatagccgtcacacgtattgcgcgcatcaccgagcggaatgattgggttagcctcgtacggcaagcgtggtgaacgaccaagcaggagcggtgtatgtaccgtcagcaaggttgacttcgtgcgaggtggggcaagtcggtgattcctctccccgaatccctgcatacggatcgttgccggtaagcacggttgcctcaactacagccttggctgaatcagacacattcagcgcagcaagcacctgagccaagtccacgtctacggattcaggcagcgcgttgacaacacgcaagtaagtcacgccagccgtcgaatcgcgggatacagtgacggtccggcgcggctcgtccggtgtctcatggccgtcggcgaccagcgcgccgtcgatgtacagtcgcatctgctcgccgcgatcgccaatctcaatgcgcacatcccacgtggttccggggcgtaccgcgtccattgaagtttccgtgccggcgagtgcataaccggtgccttcgcgcactacttgcacgctgaatccacggccaagcgaagtaccgttatagttcttgccgtttacgtcgccggacgcgattcgcacgccccacatgccttcgtaataggtgactttcgcgcgaatggtgtatgaatcggccgccagaccctcaggtaccggaagagacaccggcccattgccttggtagctcacgtccggcagatcgatatgcgtgccatcggccgtctcgagagagaagtcggcgaaatcggcgtgggcgccgccatcgatcttcaggcttacggtattcggcaagtcacgacgcaacatggtgggtccgtcaagcgagaccggccaagcggtgtccgcggtggtggtggcgtacatctgctgcacccagtagctgtacgggcggtagacgttctcattgtcaaagtagatgaggtccggattccagctggtgtggccgttcttggcaaatagcggcgcgtaggacgccatgtgcaccacgtcgccgttcaattccatgcggcccatgaacgccgcttcggacaagccgttgatgagctgggtgtcccaggagccgtattcgccgaggtagaccttcggacccttgcggtcggtgtgatcgtagtggtcgaggttgtgaaaccaccagctggaggactggtaggaatgctcgtccacaatcggaatgccggcctcgcgcgcatacgcccaaccttgctcgtagtcctgtccgctcggcgcaggcccgaccgtgccgaccacggtgatttcggggtgcgcagctttgacggcgtcgaaaatctgttggaagcggttcttgaacacgtcgtcgatcaggtcctcgttgccgatgccgagatactccagattgaacggctcgatatggcccattgcggcgcgcttggcggcccacttgttggtggccgaatcggcgttgcagaagtcgatgaggcccagcacttcgtcgatgtaagcgggcatgtcttcctgagccacaggcaccgggccctggctggtgttctggcagctcacgccggccggcagcacgggcagcggcttggctccgatggtctcgcacaggcgaaagtactcgtagaaaccgatacggaacgactggtggtagccccatacgttgaagttgtgcgggcgatgctccaccgggccgatggtgcggtcccagtgatacatgttgttcaggcccagtccgtgggtgatgcagccgcccgggaagcgcatgaagcgcgggtgcaggtcggccagcgcctcgaccagatccgggcggaaatgcttgaggcccttataggtggttcgcggttcgaggctgacgaagtcaaggtcgatggtgccgggttcggggaaagtcaggcggagagcgccttgggtggcgatgatttcggcgttgggttgcggggcagcctgtgcgctagcaatagtcagttcggcgcggagctgggtccattcgccgcaagcattggaggcgggtgcggtcacgacagtggcagcgagcggcttgccatcatcgccaatcagtgcgacttgcacgggcagcgctttgccgtgggcacgggtccagatggaaaaatcgtaggtctcgccggcgcggagcaccatgccgtcgaaaccaaggttttccagagcgggagctgcaggggtacaagccgaatccgtctgggatagggccgaatcggcccgagacacagccgagtcagcagtctgctcgccgcccaccttgccgatttcggcaatcgcgtaatgcgggttctcttcggccaccggcgcggtctcccccacaccgaatgcggcgaacgagccggcgggcacgatcttgcgccaagcggtgtagttgctccactcgggcttatccgcacggttgtattcgaacgcgccgttttgcacgagttcgctgttgagcccgccatcgcccgaatagctgatgtcttcgaagaacacgccccacaggtccgtgctgatcttgcgtacaccagctttgtccaatgtggctaccagtttgtctgccatcgccaaaccactccccagatttcacccgcgtgcagaagatgcgagcatcttctgcacatcaaatatgtaacggtacatattctaaactatctgccacactcagcaaccccgtgccgacttcagcgcgtttcgctctatttcaacattttccagaacgtattccaatcacgactgcatgtttttcacacgtaccgttacatatttcacagtgtttatcgttaccgataatgtcatcacgaaacatacctaaagcaacatctcgtcactcttccggcgctccactggccacgcgaatcatcgcgtactgggactcgtagaggcggtagtacgcgcccttggcggcgagcagctgcgcgtgcgagccgtgctcgacgatctggccgtgatcgatgtagaagatctcgtccgcgttctcgatcgtcgacaggcggtgcgcgatgatgaagctcgtgcgccccttgagcagatgctgcaggccggcctgcagcgcctcctcggtgcgcgtgtcgatgttgctcgtcgcctcgtccaggatcaggatacgcgggtcggcgagcagcacgcgcgcgaaggcgatgagctggcgctggccggccgacagggtcgatccgcgctcctccaccaccgtgtcgtacccgtcgggcagttccatgatgaactcgtgcgcgtgcacggccttcgccgccgcctcgatttcctcgtcggtggcgtcgagcttgccgtagcggatgttctcgcgcacgttgccggagaagatgaaggtgtcctgcagcatcacgcccatctgccggcgcagcgatgcgagcgtcacgtcgcgcacgtcgtagccgtcgatcgtcaccgagccctcggacacgtcgtagaagcgcgacagcaggttgatgatcgtcgtcttgccggcgcccgtcgggccgaccagcgcgattgtgcgccccggttcgacgtggaagtccacgaggttgaggatgttgcggccgtccttctcgtagcggaacaccacgtcgttgaagtcgacgcgcccgcggatctgcggcaggtccgccgcgtcgggcttgttgcggatctccggcgtgacgtcgagcgtctcgaagatgcgctcgaggtacgccgagcaggtgatgagctggttgtagaagttgccgatgttgatcaccggattccagaagttgttcgcgtagccgacgaacgcgatgagcacgccggtggtcacgttcacgcccccgaagcccatcacgccgacgaagtagatgaacgagatggtcatcacggagatggtctgcacgcccggccacatgaggaactggatgtgcacggcgtgcatccacgcggaacgcacctcgccctgctgttcctggaaggtcctgaactgggcctgctcctgtgcgaaggtctgcgtggtcttcacgccggcgatcgactcgtggatgtaggcgttcaggttgctctgcttgttggagagcttctggaaggcgcgccgctggaagatctgcagcacgcgcacccagatgatgagcaccgggaacaggatcaggctccacagggccagctgccagtcgatcacgaacatcacgatcagcgtgatcacgaaggtgaacacgtcggagatcacgttgatcagaccggagctcagcgtgtccgaaagcgtgttcacatagttgaccacgcggatcaggatcttgccgtgcgggcgcgaatcgaagtagctgaagggcagcgtctggatatgcgtgaagatatcgcggcgcatgtccttgagcatgagctggccgacgcgcgtgatcgccaccgtgcggtagcgcagcccgaactcgtacagcacgatcagcgcggcgaggatcacggcgaggatgccgagcttgccgaggtccttgttcgggatcgcctcgtcgatcatgatcttggtcaggtacggcacggcgacgacgatgcagctcatcgagatgacgacgacgagaatgcgcgccacctgtgccatatacggtttgagatatttgccgacgcgcaggatgtcccggaagttgatctgctcctcgagttcctcatcctcgcggtatgtattgcgttgtgccataagtcctcttctaaaaaccttgtgcgacgccggactggagtccgagctgcttgtggtagatgtcccagtagcggccgtgtgcggccacgagttcggcgtgggtgccgcgttcgacgatacgtccgtgctcgagcaccagaatcaggtcggaatccttgaccgacgagatgcggtgggcgatggcgacgatggtcttgccgccgtccatctccttgaggtgcttctggatctccgcctcggtctccatatcgacggccgaggtcgtatcgtccataatcaggatcgacggattgtccgcgagcgcgcgggccagcgacaggcgctgcttctgcccgccggacaggcccacgccgcgttcgcccacgacggtgtcataaccctgtggcatcgacctgatgaaattgtccgcgccggcgatctgggccattttctggatatatcggtcgtcgctatcaccgctggcaccaaaaccgatgttgccgccgatggtgtcggagaacaggaaggtatcctgcgccacgatgcacacctgcgagcgcaaggtggccagcggccagtcgcgtgcgtcgatgccgtcgatgagcacatggccaacggtcgggtcgtagaagcgggagatgaggctgacgagcgtggacttgcccgcgccggtttcgccgaggatgccgagcttggagccggcgggcacggtgaagtcgaggtccttgaggatcggggtctccgggtcgtccgggaaggcgaagctgacgtggtcgaagcggatgtcgcccttgatgtgcagcgggcaggacttgcgttcggtggactgctgggcaccggatgttccggaagccacgggcgctccggtagccccggtagcctcatcatcgtgcttgacttgctcgacgatcgtgaccgcctgcttgacggcttcgaccgcgtcgggcttctccacgatgcgcggctgttcggtgagcagcttgcggattttgatgcagctggcgttgaatcgctgccagtcgttgatcagccagccggactggcgcaccgggccgtcgatcatccacaggaaggagttgaaactcaccagattgccgagggtcatgtagcccttgatgaccagaaagccgccgaggccgagggtgatgagctgcagcgagaagccgaggccgtccagccacggcatgtacttgcgcgagttgtaggccaaggccatgttgcactgcatgtaatcgtcgttgtgctcgtcgaacttttcggtctcgtacggttcgcgcacgaatgccttgaccacacggttgccctcgatgttctcttcgaccatggagttgagggaggccagcgagttgcggatggcgaagaacagcgggtgggcgtgcgtggacaggccgcgcgtgagcacaaaaatgaacggcgtgacgcaggccaggacgagcgcgagtcgccaatcgatggcgaacatcacgcacagggcgcccacgaacatgaccacgcagtcggcaatctgatagctcacccaactcaggcagtggcggatcgcgtcggtgtcggaggtcaggcggctcatgatgtcgccggtgcgtgtgtggttgaaatacgtgaagtcgagctcgtgcagcttctcgtattcgtcggagacgaggcggtagaccgagttctggccgaaacgctccatccacatctggtagccgtatcgcgcgcccacgcggatgatggtcatgaggatcatcagtccacacagacgtggcagttcgtcggcatgtccgccgacgatgacgcggtccacgatgataccggacagaatcggaatggtcagggccatcgtgttatttgcgatgaacagtagaagcgcgcctaccacgcggggcaggtctggtttgcagtatggcagcacccatttgagattgcttgcgctggtattgattcccggatcgacgtacatgtgaggagatcaccgtttcttggggattgtttgcttgtggtatggtgcggcatgctcctgcgccgcacgcggcaatcgctgccgccgcgattcacgatcagccgtgcttcgcactgcgcctgtcattggccgcatgaccgaagctctccttcatcggtcgaagcacgttcgactttcgcaaacgcgtactagtctaggcgacctgcgtctaatcgcaacggcccgcaactctgcgtgttccccgcattagcaacgatacgcggctctctaagcgcaacattccccggaatgcgtcgctgcacacctccgaacaggtccaattcgcaacgcattcccgggaaagtggcgcatgtcatatcacgctcaaacaacccagcatagtgagtggttcattcacattttacgtattgtgcgacggaatcggcatctcccgcaacacgtgagatatgcaaaagtgccgcacgctgaatggtgatcagcgtacggcactacgcgaaacgcgtgaaatccgcagaacgcacgaaactcacgaaacagataaaacgtacaaaacgcaagcaaggcgaagacaacgaacagacagagacagtccacctacaggtcagaacgccagcgaacgcacgtaggagccaacttgcgggcggaacagctaccggggattgttcgtttgcgatgttcgcattcatggcaggtttctccatacgattcgggcggtcggttcaggaggttggttggcggaggcaggttcggtatcagcgtcggtccaaggccacccagagtacgccgtgcggcggaatcgtgccggtgatgacgcggtcggcacccacgccttcaagacgcacgtcggcggactcgcccggcgcgtcggcatacagatcggcgagtgtccaatcgtcattacgggcgtcaagccccacaatggattggagctggatgttgcggccgatctcgtatgtgtcgctgccggtccagaacagcgcggcgtaatggccgccgtgatgcgcggaacgtgtgccatcagcccaatcggctgcgtcggcggaccagacgatgaactcgccacggtaggtgctctcatcccaccatttgccaaaaatccgttcgcgcacggtctcgcggttattggtggagccggcaagcacctcacgcaacgcgggattctgcagcagcgcgatggcgtcgctgttgctggtgggcagatcgccgccgaccataagcgggctacgccccatgcaccatagggccagcagtgtcttctgctcgtccagcgtaaggcgggattggcggtcgtcgccgcgttcggcgcgcaggcctatgtgcccgaacggcaccatgtcggcgtcggcccagtggccggtggtctggaacggcgcccagcgggccagacgggcgaactgctggtagatgtcttcccaacggtcccacagatcgtcggaaatacgccacatttgggcgttctcgcgcaggaagtcgacgtagctcgtcgccacccagccgccgggcgagagagacaggtcaatcgaacggccgtatttggcttcggctttggcgatggcgcgatgataggcggcgatttcgtcggagtggaacggggtctgcatgtcgtcgaccttgaggaagtcgaggccccaggaggcgaacaggtcgagctgcgcgtcataccaggcctgcgcgcccgggtgggattggttcaggccgtagttgtccggattccacttgcacacgtggtcgaggtcggccacgtccttggcggtgtagttggtgccgtatacgggcaggttcttgtccacagcgatacgcgggatgccgcgcatcatgtgcatgccaagcttcaagcccagttcgtggacggcggcggcgagcgggccgaatcccttgccgccggcagcactcgggaaacgcaccgggtcaggcagctgacggccgtattcgtcgagaatcagcggcgcgttgtcgttgtaaccatgtgcgcgggcggtcggatcgtaccagtcgatgtcgatgaccaacgtatcccagccggcgtttttcaggtgttcagccatgaaccgcgcgttggccagcagctcgtcttcggtgagagtcgtgccataggaatcccagctgttccagcccatcggcggacgccatgcctgaggaaggctctgcggaagatccgtcatcgtatcctgctttcgttgatattcgcataagttgccctacggcggtatgccagccgcaaaccaatcggcatcgcgcacgtacggataggtgaagagtgacgccactcccccggagagtcccatcccaacgtacgacgaacttcatggcctcttggcacaccgacgtatgtaccgttacatattcttccaccggaacgatatcaagcaagcgcatgttacgctcggcgcgtcatcgcctaagcgcagcattttcagcgattccggcacacagccaccatttgccaaaacacgatgttgtgaataccgttacaaccattggaagcattacgggcatgatccaatgcccatcacaggcgaaacatgaggtgacgttatgccgagcggcaaaccaacattgcgcgacgtagcgaaagccgccggggtctcccccatgaccgcctcgaatgcgctgcacggcaagccgggtgttaaggattccacgcgcgccaaggtgctggcggtggccgaaaagcttgattaccgcatcaatctgacggccagcatgctgaagtccggccgcagcaacatcatccacatcatcgtcaacgaattcgattcgccgttctactccaaactcgtcgaatcgctcgtcaccgaaaccaccgagcgcgggctgacgccgttcgtggagcaaacccggtactctccggatgccgccaaacacgcgctggccaacaacccgttctccgggcagttgttcgacggcgagattatccacgcttcgggcctgaatgccggtgtgccgctttccgcgatcaaccacggccgaccgctggttctgattgacgcctgcgaggaaacgcccacgttcgatacagtgaatttcccgaacgaagacggcgcgcgggcggcagtgcagcatctcatcgaatgcggatgccaccgcatcgccattgtcggcgacgggtattcgccacgaaccgaactggcgcacgtggaaagttccagcggtttgcgtctacgcggggccagcggcgcactgcttgacgccgggctgccgtatgacgaatcgacgaacttcattggttacggtagcgacagcggcatcgaagccggtcatgccatcgccgaggcgatgctcgaggctcgtgcgcaatcggctgatgacactgctgagtcccgttccccgggcaccacgcgggcaacgggaagcaccccggccatcgatggcatcttctgcattaacgactatgccgcattcggagtaatccgaggccttgccgactacggcatccgcgtgcccgacgatgtgagagtcatcggcttcgacggcgccacggccggctcgtacaccacaccgacgctgagcaccgtccaagtggatctcgatcagctcgcccaattcgcgcttgatatgatcacccgccgcgtggagcagcgcgaccagggcgacggcaggtccgacgaatccgctggcatgccggccacgcgcgccaccattggatacacactggttccgcgcgagtccactgtcggttcggcaaacaggtaacgctgaaacgccgaaatagggcggcgattcccgactgccgcgcccactgcccaagtgccgtgcagcgtgacgtgcgaggtttcggcatgcgtcaaaccgttcccagcgctcccacgtggtagtggcgcccatgcgcacttttcctagggttaggaccatgaccttccctaatcacacggtgttgtagaggcgggcggggaaagcgtcgcggtattggccgggggtcaggccagtgcggcgcttgaagacgcgcatgaagtacttgggatcggcgtagcccacttctcgcgcaatatccgccacgctggaagcggtagaactcagcagttcgcgcgcacggtcgatgcgatattcgatgatctgctcggccacacccacgccgaacacgcgccggtacatcgcggtcagatagctgggtgaatagtggaagcgcgcggccactttggccacggtgatgtcgtcgaaggcattggccataatccacgagcggatggccagcatcggcgccaggccggacgaatcgccagcggcaccggccgaatcgacatgcatggcccattcctgttgctgccggacgcggtcggcactggtgatgggcttgccgtcgccccggtagccggcaagcgtacgatgggcggcaaagtccgccttcagccgctcctgcgcgctgacctccagcagcaggccggtggcgaagtaatcgcagtaagcgttggaatacgggccgaatcgcgcatagatgtcgatgagctgcccacacatcaccgccagccggtcggggtcgggcagggtgcgttcatcgggcagcaacaggcaatggtcgtcctgcggcagacccgcgtcatcggggagcatgcgcgcatccggcaatttgaaatgcatccagtagaagtccacgtcagacgtgatgatgtcggcgcccgcatgctccacattcggcggcaagagtgcgatttggccggcctcgatatgcagggtctgctcccccacccgcatcggcaggacgccccgacgcacgaacatcagctcgaaggtgtcgatggtgcgccgcagatggcgccagcccggtccggacacaaactgcccgaccgagtaaaagtccaccggcccttcgagccgacatgtcgtgatgcccatggctaccagagtagccgagagcaaatatcagccgcgcagccagacggtcatttcgttttcgccgcggttggcccaggcgaagtacgggatgagcgtggcggtggcgggctcgcgcttgaccggcgcgtacacggcgtagagcggcgcgaacgccggaacctcggccgcgccctcacccgcggcggccacagcagccggcaacggctcgcgccaagccggcacctcaagcttcaccatgcggcgggtcacgtcttccacctcgccctggcccttgtcgtcgatgcccttggcgccggcgtggaagtcgaactcctcgaccttggccgcgctcgggtcggccagcagtgcctccacatccgcgtgcagcaggtgcaggttggcgccgttgtctttttcctcggcgcagaaggtgatcgggccgcgcacgaacgccaccttgccggcgtcctcgcgcaccagcgggttggcggccagcatacgcaccggcatcgggaagtcgaacgtcacggtgtcgccgtcgcgccactcaccggtcagatacaggtagccgtcgcgaatttcgcgggtcacgcgggaactatcggccccagactcagactcgcccgtggccgtaatcgcggcggcagcagcggactcatcgcccacccaaccgggcagacggaaggccagcgtaaagcgagcaggagcctgagccgaggtgccagcagcgtcaccgcccaagcgcacgaccgccttgccatcgccctgccacggcaggttcgccgtaacatccagctccacagccgtaccattcaactcagctttggccacgccgcccatatacaagtgcgtgaacagcgtaccgccatcctcggcaaccgtgtaggcatattcctgcaccgactcaacgatgcgggcgatgttcggcgggcagcatgcgcagccgaaccacttctgacgcaccggcttgacgtggcgcaggcggctgtctttatggcaggcatacggattgacttccagcgggttcacgtagaagaagctcttgccgtccagcgccatgccggccagcgtggtgttgtacagcgccgactccataacgtccgcgtactcggcctttggcgcgagctcgagcatgcgacgggcgaagaacgccagcgaaatcgcggcgcaggtctcggagtaggcggagtcgttgggcaggtcgtagttgtaggagaatgcctcgccgtccaccgtgccgccgatgccgccggtaacgtacagtttcttatcgacgatattgcgccagagccgctcggccgcatcggcgaggtcctgatcgtcggtcagtcgggccacgtccgccagaccggagtagaagtagccggcgcgcacggcatggcctacggcttcgtcttgttcggtggccggcttgttcgcctggtggtaggcgtaccggttggggtccgtgttgggtttgtagttggcgtcggcgtcgcgctttgcgttctcgtctgcctgaatatcgaagatgtacggctgccggcctcgctcggtcacgaaatattcggccagatcaaggtaccgctgttcgccggtgacctcgtacagcctcaccaaagccatctcggcaatctcgtgaccggggtaaccacgcagctggcccggcttgcgaccgaagcgctcgtctacgtaatcggcgaaacggcaggcggccttgagcaacttgtctttgccggtgccctggtagtaggccaccgcaccttcaacgaggtggccgaggcagtacagttcgtgatggtcacgcagattggtgaacgcgcgatccatgtcgttcagaatgtagcaggtgtccagatagccgttgtcgagttgggcggcacacacgacgtcgatggcttggtcggcggtctgttccagtgcggggtccgggtaatgggcgagggaatagccgactgcctccacccacttggagaagtcggtgtcttggaacacgaagccgtagaacttgtctgggtcgggattggccgggtcttcggggagcgcctcaaatccgcggaacgtgtacttcggcggcacgaacgccttgccctgggtatccttacgcttgttttgcgcggcagcggccttgaagttgtgcatgcagtagctgggggccgcgccggggacgttatcgttcagggcgttccactgatagggaatcacagccgtgcgcacgagttcctgctcggtgcgccagaacgaatcggtgacggtgacgtttttcagggccagcggcttgctatgcagcgaagtcatgacgtactcctttggactatgcgacattcgtcaacaatatgtatcggtacatatgatacgtgcgcccgcgcgagcagcaaggtggacaaatcgttggcggggtggaatcgccggcgcatatccgcccgtacgatttcgcccggtgaatcgcccgacgaatacacggcgacttatactaccgacggaccacaaacgtcgcctacatgaatggaagatcaatcatcatgacagcaaacgccagcgcacgggccatcaaacccgaacttctgcgtacgtacaccgaagacttcaacaaagaccgcgccaacctgatcgcggcggacgcggcggtttcggccggcgtgctcaaggcggccaccgactatcgcggcgtacgtgcgctgccgcgcgacttctccatcgaactcaagcagggttcgatcaccaatcaggagcgttccggccgttgctggatgttcgcctccctgaacacgctgcgttacgaactcatgcatcgctggaatcttgaggatttcgagttctccgagacctacctgttcttctgggacgcgatggagaagtcgaacacttatctggagaacgtgctgcgcacgctcgacgaggcgaccgattcgcgtctgttcgaggccatcaatgagtcgcctgcagacgatggtggctggtggcagatgttcgccgcactggtgaacaagtacggcctagtgcccaagagcgcctacccggagtctgagaactcccgcaattccgacgatttcaagcagtacctcaactccaagctgcgcgagttcgcggccgagctgcgccgccgttcggctgccggggcgtctgaggacgagctgcgtgcgttgaaggacgagtacatgggcaccgtgtaccgcatctgcgccgtggcgctcggcgaaccgccggagaagttcgacttcttcgcgcgcaccaaggatgatgatgaggataagaagggcgaagcttgcaagtgcaaggccgaggccgacgcagacggcaaggccgaatcctgcaagtgcggcgaatcctgcaagtgcgagggcaaatccgacgccaaggcctgcaagtgcgataaggacaagtccgacaagccgaaaaccggcaaggacgagcgcccgcagattcgcgagatcggcatcaccccgcttgagttctacaagaagtacgtgccggtggacgtcaacgatttcgtgacgctggccaacgccccgctcaagaaccgcccgttcaaccagcgctaccgcatccgcttcagcgcgaacgtggccgaggctggcgatatggaattcgtcaacgtgccgctggacgtgttcaagaaggccgcgcttgaccagctcaccgccggccacccgatctggttcgcctgcgactgcacgcagttcgccctgcgcaaggacggtttcttcgaccagtccgtggtgcgcgtcgaccagctgttcggcaccgaattcaccggcgacaaggcccacggcctcgaatacggcgacagcccgagcaaccacgctatgaccttcaccggcgtgaacctcggcgaggacggcaagccgaaccgctggaaggtggagaacagctggggcaaggacgccggcaaggacggctactacgtcatgtccgacgcctggttcgaccgctacgttaccgagctcatcatccgcaaggaatacctcgacgacgccacccgcgccctgctcaccaccgaaccagtcgagctcgatccctggcagcccctcacccgtcgctgccgctgatatattccgtctattggccgcggctgaagtgctcctatgttttgccgactcctcacagagtgagcaaaacataggagcactttagttatccacagagttatccacatcctcagcaagctagaaccacataccccgtttttcatggcgaacacgcgaccgctacgctacggtggcgttatgaacagcggatttcccaccccgccacccggcgtattcgacgatgaaccacccggctggaccaacaatgccgcggcaccgagtgctgcgtccacgcacgccgtcaagcccgagccatactcaccaccgcgtatggcaacccccactgcgcccgctatgagcgaaaccctcacccaacgtaagcgggaaatgcttaaacgatgcacggacgccgcgcaacagctcggaaagccggtgctcttcggcatgaccacatcgctgatactgcaatccgtgccgcttcccaaggattgcgatctcaatgccaccgagctccataccgtctccgactcgcatcgcacccggatacgcgccgtcgttccgccaacaacaccgcacatctggaaaccgctaagcaccgcgcacaatgcacgtatcaacaagcatgtgcacgcgctggatctggtacatacttgggcgcagctcgccgctcacatgtcattggaatcattggtcatacttggcgacgcaacccttacggcaatagcgcgcaagccgagcctatcgggcggccgcaccgccgacgaaatttatcaggactttgtgcggcaggtcagcgaacttccgaaattcaacgcgaaagccacatgcatgatcgcacttgaatttattgcaccgcgcgtggattctccgatggaatcagagacccgtatcacaaccacgcaatacgggcttccacgagccgtgacaaattacacagtgcccggcgcgacgttcagcaatggtgcgccgataacactcgatctcgcttggcccgaattccgcgtcgccatcgaatatgacggcgatcatcatcgcacagacaaggcccagtggcggcgagacaacgacaagcgcgaactgttacggcatcatcattggatcgtcctcatcgccaccgccgcgaatatggctgatgaaccgtctcaagccgaactcgcctaccgagccgggcgacagctggcgttgcgaggctccatattcgatttcaccttgacagcgacgccgctcaatgaacttgcccggcggaaacgacggaaatccaccggggcgcactgagctgacatcgatacgattgcgcgcgcttgctgcaacgcatatgccattcatcgcaccccatttggtcgcgtggccccgaccgcatggcactgttgtgtgtcacacgccatgttacgtccggcgaatccgcacatcatctgcgttgcgtactgccatattatgcggttcgcgatatacgtcacggtgtccgatgtcctggtaacgacgtcaatcgatttatgtgtgtaccgggccagattttgttgtcccggttctccatttcgcctctttttgagcaaccgggacagaaacaccctcgaaaaatcgccaattcggccctaccgcacaatatccgccatcacacatcggcggaattccgggcttctggatttgcatacattgagcgctcacgggatggtctgtcccggttcccaaaaagaggccaaaatcacgaaccgggacaacgaaatctggcccggttcgcacgtcaatcggttgccgtcaccaccgggacaccgactgcgcatagataagatgcttcaatgcttaacaggcatgcgaccataccgcgatagcaacgtttcgctggaagtagaggaatcaagcagcaccccccaaaccggaagcatggaggaatcctgcaatgctccgaatcaccgcgccccgtgcttggtgtggcggatcacggcttcgagcggcgtggatgtagctggacagcagcgtaacttgcgttgcatgatgcggcccaaaacgaagaaacccggcggagggggccgccgggtgagagagaagagagaagaagggttcagttatggggttcggaagaacctcgccaccggtatgaacttcattccgttgacatcttctatataaccgtctctttcttggggattcgatgtgcttgtctgagaaaagtcttggcaaactgtgacgggtttgtaacgccgcccgacaaccggcctcgcattgtcggggctaggccgcacatacggcaacgggccaccccgcaacacttcatgtgcgaggtggcccgtcagctacgagctagcaatgccgaatcactcggcggcgagcttggccttctcggcggccagacgttcggcttcggcggcacggcgagcagccaacgcttcatcgaagcgagccagctcctcttccacggcctcggtcggaatcttggcgaagatcggtgcgggcttaggcaccatggcgccgacctcgattgcctcgctcttccacgggtgcacgttcacaccgagctcgtaatcgccggtgatgatcgggtacgtgaagccgggcttgtcgagatcctcgacttccttgagctcaggcagcggcgagaaggtgccggtgccgccgagcgcctcccacaccttctgtgcggagtgcggcaggaacggcgcgagcaggtggttcgcgtcagacacggcctgagcggccacgtgcagcacggtgccgagacgagcctggtcgtccttaatcttccacggttcggtggcggaaatgtacttgttgatgtcgccgaccacacgcatcgcctcggacagggcgtgcttctggtggtgggtttcgatggaggagccgaccacgtcgaacgcggcggaagcctcttccagaaggccacggtcttcgttggtcatcgaatcctcgtccagcggcggaatctcgccgaagttcttgttgatgaggttggccacgcggttcaccaggttgccccacgaggaggcgagctcctcgttgttgtggcgcacgaactcggcccacgtgaagtcggaatccgaggattcggggccggccacggaaatgtagtagcgcacggcatccacggggtagcgggcgaggatgtccttgacgtagatcacgatgccgcgggaggagctgaacttcttgccttccatggtcatgaactcgctggccaccacctgctcaggcaggttgagcggacccatcgggccggtttcgccgcccttggagcccttgccgttgtacgccagcatttcggacggccagatctgggagtggaaggtgatgttgtcctttcccatgaagtagtaggccgggcagctcgggtcgttccaccattcgcgccacttctccgggtcgccctggcggcgggcccattcgatggaggccgacaggtagccgatcacggcgtcgaaccacacgtacagcttcttgttcgggttgtcaatccagcccttcaccggcaccgggataccccagtcgatgtcacgggtgatggcgcgcggcttaacttccttgaacaggccgagcgagaagttgatgacgttggtacgccagcccttgcgggtctccagccacgccttgttggcttcggcgagcgccggcaggtcgaggaagtagtgctcggtctgctcgaagcgcggggtttcgccgttaatcttggagacggggttgatgagctcgtccgggtcgagctcgttgccgcaggcgtcgcactggtcgccacgcgcaccttcggcatggcaaatcgggcactcgccctcgatgtagcggtcgggcagggtacggccggtggacgggctaatcgccacctgctgggtgcccttgtagatgtagccgttctccaagcactgcttgaacatctcctgcaccacgtgctcgtggttaccggtggtggtgcgggtgaacaggtcgtagctcaggccgaggtcgcacagatccttggcgatcacgcggttgtaacggttggccagttcctgggcagtgagaccttccttctccgcctcgacgagaatcggggtgccgtgctcgtcggtgccggacaccatgagcacatcattgcccttcatgcgctcgtagcgcgcgtagacgtcggagggcacaccaaatcccgcgacgtggccgatatgacgggggccgtttgcatacggccaagcaacattcaccaaaacatgactcataaggcttgattatccggcgcggcggggacacgcccggatagctgccgcgccgccatcctcatcccactcacctatccacccgcaacttccccacatacttatctgtacacctcttgcgcgcttatccacatacgcattcgcacacgtatccgcgcacccatccgtacgcacgcccacgcacatccgcacacacttccgcctgccaatatccaccgagttatccacatcatttgcgtacctagtaaagttatgcacttatccaccgttttcgcctatccggtggcgcgcaagccgcatttctgcatattgttcggtcatggatatcacagcaggtccgatgacggacatcacaacagtcgcctcgccggcaaccgcgcaacctgcggtgccgccgatactgtttaccaaggatctgccgggaccgctcagccttaaccgtctggccgccttcggcacgttacataagctcgacgattccgccggctactggatcgagcattcgggcacactgtatggtcgcgcgaaaatcgtcgcggaggtcgccccgtttggcactgtggtgtgttcgatgaccgccgcttgggtatggctgggaggccccgactttccgagtaccatagacgtgatttccacatcgcacttccgctcggcatccgtcagccgccgtatccgcgtattcaaaagattgacgttgccggagcaaatcatcaagctcggcgggctgcctgtcaccacgccagcccgtacggcttgcgacctggtgatgagtcctgaagacatccccgatccttccaccgtcaacgcactggtgtgccagctgatgtccgcgtaccagtttcggccaaacgactgtctgcaaatcgtcaaggagcatcggcatcacaagtacgccggacgcgcacgcatgttttttgaatcggtgcagcaggagatggacgaaccggctttggagcaatgcgcatgacgagggggttcattgtcagaggccatcgcagaggccgccatgccgctcaccgtttacggcatttgcggcaggcgcaacggttgcctcgccacgcggcggcggcacactcatccgaatccgcatcgcgcgcaatctcggatatgaccgcgccgcctgaaccgcccatcagacttacgcccgcggtggcatgttcgcccgatacggatgttgccgtgctctggcacatcgcatatcacgtgcccgaactgcgtaaatggctggttgccaatcccaaagccgacgcgcctttgctggaattggtctcgcagcgtggtgggcccggggtccggcaggcgttggaaatattgttcgagtcgatggaagcgtaacggggagataatcgccggctgctgcgctatcccttgattttcagcacagccgcatacacctgcttgcgattggccaacgatccgtcagccagtggatgctcctgcaccacttgcgcgatggcgtccttgatacgcaggccgtcctccaaagcacggtcgatggagagcacggccatgtcatccacgctcaacgtgctgggcgcggccgcttcggcctcctcgttggacgcgccgccgatgaccagcaccatctcgccacggggcggatcatcaatcacactttggcgaatctcgtcaatcgggccgcgacgaatctgctcataatccttggtgagttcgcggcacagggccatcgggcgattcgggccgaacgcgtccagcagatcgtccatcgaatcggcaatgcgatgaggcgtctcgtagaacacgatggtgcggcgttcgggcaacagcgtgcgcagatactgcacgcgctcggaatgctttcgcggtaggaagccttcgtagcagaagcggtcggtgggcaggccggagagggcgagcgcgtcgagcacagcggaggggccgggcgcgcaggtgacgggcagaccgcgttcgatggcacggcgcacgatggccaagccggggtcgttgatggtgggcatgccggcatcggacacgacgagcacggtggcgccggtttcgacctggtcgagcaggccgtcggccttgtcgcgctcgttgtggtcgtgataggcgatgacgcgaccgttcacatagacgccgaggcgacgggcgagatcgtagaggcggcgcgtgtcttcggcggccacgatatcggcccgttccaagagggccaccagacgggctgaagcgtcgccgacattgccgatcggggtggcggcgagcaccacggtgccggcggggatggtcacggccgattcgcgggattgggcgacggcggattcgccggcatgaacttcatcattgcgttcaggcacttgcgtcacgctaccgtcagcgtcatactgctcattcaactcatctgcgcttgtcatactcccagtattgcccatgccacagagcaatccacgacaatccatggcgaaatcgaggcattctccctttgcaggggctgatttcacatgttccggaggtctacttccgtttcaaggggctcctcatccggtgaagcaccgatacaaacggctttgacgcaacgctattccgccattttggcggcgtatctacttgaccatcagcccctcgaaacgcaagtagacctccggcaaaccccaaatcagccccttgaaacgcgagatggcagaatttcaacgaaaacaaatgaaaagaccctctgcggtggaatgaatgcagagggtctcgtggagctgacggtagtcgaaaccgcgacctcttcgatgcgaacgaagcgctctaccaactgagctacagccccttggatgttactttgctccgcaaagcaactcgcaacaatatagtacggagtacggtcaaacgcaatttgacgccgaagtgtcgcacgcgtgtcgacacggtaacgtttcggtgtcgcagacggggcaagtcacccacaccgctccgcatggataccgcggcggcacccggcaacgtcatcacgtctccagcacgcccagcaccttcttttcgttgtagaacgcgaacacgatgccgcccagaccgcacagcacggccgcgcacacggcggcgatgcggtagcccgcgccggacgccatgccgatggtggagacgccggtgaacagcagcatggccacggactggcccatcttcatcgcaaaggtgcgggccgcgtagaacatgccctgacggtcctggccggtggtcttggaactggcgtcggcgatattcgccacgatggcctgcggcaggatgccgaacgcggccatcggaatcgcgccgaccaccgagagcaccaaaccctgggccatcgccggaatgaagccgagcacggccgaaccaagggcgccggcaaatgcgaacgcacaggtgaagatcacgaaggcaaccagcagcagcctcttcttgccgaccttattggccagaatattgaccggcagatagaacagcacagagacgccggtcatgagcacgaagtagatggtcgtggtggtttccggcagcttgagcaggctggtcacgaagaacggcagaccggtctggaaggtggtgatggccacccagtagaccacgtcggagcatacgaacttgcggaattcgccgtcgccgaacgtctgcttcagggattcgatggtcgattcggaggtgggctgggagttgacgtagtccttctcgcggatggccagcggcggcaccagcatgcacacgaacgccacggcggccatgatggtgaaggtcacgcggatggcggtgatgcggcccatcatcggcacgaacgcgccccaaatcaccggcgccacgtacgcgatggccgtgccggccacccaagtgaaggagatggcggtggagatggtgagttgctgcttggagtcgtggccgagttcggcgatgagcgcgttgtacggcgtgcagtagaacgtgagggcgatgtagtagccgatcacggtgacgaacaggaacgccgcgttcacccagctggtgccgttgatcgggctccagaacacgagcacggtgaccaccgcgagcggcagggcggcgaatttcaggaacggcatacggcgtccagatttggaatcgcaacggtcggaaagggacgccacggccggatccacgaaggcgtcgaagaatcgggcgaaggcggtgatgccgcccaccacggtcacgatgccgagcacaaccaggccttgcggcacgaatacggtctggccttgagagatggtctcctgatcgggctgatagaaatacacgagccagttggagataatgccggaaagcagtgcccagccgaactggccgaccgcaaacgcccacactttggcgatggggagatctctgatggctgacttcgccggtgcaacttgcacacccgttacacttgctgtagtcgcattgcccattctcacaacctccgaatcaacattgacacagtgtcaaaatccagtatacaccggcacaccatgcgctctacgatagtgggcatgacaagtctgaccgagcaactgccatacgtatacgcttttcctgatgcgttggggaccggattactggtgcacaccgagagcgtattggacgatgagatacgcgatcgtattggctcgttcatccatgaatatgaggttgtattatctcgattccgcgatgattccatcgtcggccggatgcgcacggccgcacatggcggcacgttcgattttcccgactgggcatcgggtctgtttggcctgtacgaccgcctgtttgcggcaaccgatggggcgaccgacccgtgcgtgggcgaggatttgattcggcttggctacgacgagtcgtattcgtttgcggctacgcccgatgccgccgaacatgcaggcgcgatccacggacgagccatttggtcagccgacgttgagcggcatggcacaacactggtgacgcgcggaccggtcgcgctcgatttcggcgcgtgcggtaaggggtatttggtggatttgcttgcggggatgttgggtgatggcgcgggtcaccctcaacccattcaatacgtcatcgacgccgggggtgatttgctagtgcacacggacgaaccaatcaccatcgcccttgaagatcctgccgatccggccaacgccgtaggtgcggtcgaaatcagccaaggtgcattctgcgcgagctcccccagccgccgccactggtctgacgccgcaggtcaccaacttcaccatctgctcaacgccatcgacggactaccggttgacgatgtagccgccacatgggtggccgtcacgccgccatcgagcgccataaccacgaagacatcgacgcatgccagcaatgcctcgacaacggcaaaccgcgataccgacgattcgtcgaacaccgttgcagcacacgtccctgtcacactggccgacggactcgccactgctctgttcaccaccccggccacccagctgcgcgctcacttccccttcgaatgcgccattctcaacgccaaccgcaccgccgcccaatcccccaattttccgggcggttttttcacacactaatgtacgaaatcatcagtatcacatccagtggagcattccctcgggtggaccgatgggttgctccccctcagtcagctacgctgacagctcccctcggagaggggagccgagtatagctaatccgctaatccgctaacgcaggaaacaatccgtcagtcagcaagcgcgaactggctgttgtagaggtcggcgtaaaaaccgcccgccgccagcagttcatcatgcgtgccgcgctcgatcacgtcgccgtggttcatgacgaggatcatgtcggcgtcgcgaatcgtggagaggcgatgcgcgatcacaaagctcgtacgccccacggtcagcgcatccatggccttctgaatcagctcttcagtacgggtatcgaccgaggaggtggcctcgtcgagaatcagaatcggcgcgtcctgcaccatcgcgcgggcgatggtcagcagctgcttctggccctgggagagcgacgacttgtcatcgagcacggtgtcatagccgtccggcagtgagcggatgaagtggtcgaggcccacggccttgcacgcatcctcgatttgcttgttggtcacgccaggcttggagtaagcgacgttctcgcgcacagtgccgcggaacacccacgtatcctgcaacaccatggagaactggtcgtgcacgttccagcgcggcacggacttggtgtccacgccgtcaatcgaaatcgaaccgccggaaatctcatagaagcgcatcagcaggttgaccatggtggtcttgccggcaccggtcgggccgacgatggcgaccttctgaccggccgagactgaagcggagaagtcgttgataatcggcttgcccggctcgtagccgaactgcacgtggctgaattccacgtcgcccttcacttcgtggccgcccatgtagttcttgccgagtagggcctgcttgccggattcgtcttccatctccggctcttcaaggaagccgaacacgcgctcggcggcggccgcgcagcgctgcaggttctggaaggcctgcgcaaactgcgaaagcggctgagtgaacaggcggatgtacatcatgaacgccacaatcacgccgaactcgatctgcccgtcgagcgcgagcgccgcgcccaccacgcacaccaccacgtagccgaagttgcccacgaaattcatgagcggcatcatcaggccggagaggaactgcgacttccagccggactcgtagaggtccgagttgtacttctcgaagcggcggatcgaatcggcctcgccgttgtatgccttgacgatgaggtggccggcgtacatctcctccacgtggccgttgacgtcacctagcgccatctgctgccgggcgaagtacttctgggaggacttcatgatggccatcatgatgatcaggccgatgaggctggcaccgatggcgcacagggtcatgatcacgttgttgtagaacatcatcaccagcgcgcccacgaacagcgtcaccgaggtaatcagcgagccgagcgactgccccagcgtctggccgatggcgtccacatcgttggtgatgcgggacagcacgtcgccgtagctgaccttgtcgaagtatttgagcggcagtttgttgattttgaccgagatcgattcgcgcagtcgctgggcggtgcgctgggtgacgttggccatcatccagctttgcacgtagccgagcacggcgtagcccacgtacagggccaccaaagtccaggcgatgtggcccaccgtgccgaaatctaccgagttcatcaccggtctgccgttaacgatggcgggcagacctttgacgatctcgttggtcatgtccttgagcttgtccgggccgacgatctggcagacggtgccggccgcgcccaggatgagcgcgatgatgatgacgggaagatagttgcggcaatagttcacgagcttgcccatgactttgccgaaatcatggggctcttcgacggcacgcctgccgcccattggtcctcttggcatttgttttactccttaaaagtccgtattgacctccctctgatgaaggaggtggcgcgaagcgccagagggagagaagccgtacgcgactacccctcagtcagctgtgctgttttattcgctcgcttatcagctcgtcttcgcctgggaacagcccactgggctgttccctttacggctcagcccctgacatggggagctaccgctgccgcccccccctacgccgtaagctccgactggctgagctgggattcggcgatctggcggtatacgtcgcagttgtcgagcagttccttgtgcgtgccctgacccacgaccttgccgtcgtcgagcacgacgatgcggtcggcgttcatgatggtgccgatgcgctgggccacgatgagcttggtggaatccttggcctcgcgggcgagcgcgtcgcgcacttcgcggtcggtcttgaagtcgagcgcggagaacgagtcgtcgaaaatcaggatttccgggtgacggtacaccgcgcgcgcaatcgacaggcgctgcttctggccgccggacacgttcgatccgccttgggcgatcgcggcggaatacccgccgtccatgcgcgccacgaactcgctggcctgcgccacgtcggcggcggccctgacgcgattcagctgctcggccggtatatcggcaccttccacggcctcgccagcggcgatcaacgcggcctcgcgcttgcgcccggccggggtggaggtatcggccatctcgacctccgccgggtcgcccggctgatcgccgtagctcacgttggaggccacggtgcccttgaacagcacggactgctgcggcacgtagccgatcttgtcgcgcagggccttcaggtcgtagtcgcgcacgtccacgccgtcgaccaacacctggccttggctggtgtcatagaagcgcggcacgagattgataagagacgacttgccggagccggtggagccgatgaacgccaccgtctggccctgctcggcggtgaagttgatgccttccagcatcgcctcgcgcgaatccgggtaggtgaagctgacgttgcggaattccacggtgcccctctggccggttttggccacgtcggcggcggttttggtgccgttctcgacgattggctcagtgtcgagcacctccatgatgcgctgcgcggacacgtcggcgcgcggccagagcacgaacaccatgctcatgagcaggaagctcatgatgacctgcacggagtagttggagaacacgaccatgttggagaacacggtgagcttgtccttgagcccggcggcgtcgatgaggtaagcgccgatccagtagacggcgagcatcaggccgttcaggacggtgttcatcaacggcatcatgaacgccatgacgcggttggtgaacagctgggtctcggtgaggtccttgttggccttggtgaatttggcttcctggtagtcctcggcattgtaggcgcgcaccacgcgcaggccggtgaggttctcgcgggccacgaggttgatgttgtcggtcagggcctgcatggccttgaatttcggcatgaccatggccatcatgatgacgatggccgccagcagaatcactacggcgattccggtggcgagcgtccattcgaagccttcgccggcgatcttgcacacggcccatactgccataatcggcgatttgacgatgagctgcagacccatggtgatgaacatctgcacctgcgtgacgtcgttggtggagcgggtgatgaggctggcggtggagaacttgctcatttcggccgggccgaaggactcgaccttgcggaattcgagcgagcgcagacgctgggtgaacgaggccgccacgcgcgcagcgatgtagccggtgatgatggcacacgccgcggatccgagcgagatgagcagcatcttgccgccggcaatccaaatgtccttcatgtggctgcccggcgtttcgaccagcgtggtgatgtctgacatatagtcgggcagtttcaggtcgaagtagacctgcccgacgatggtcaccagagcgatgagcatctgaccgatctccgctttggagaggtatttcatgatgcgaagcattggtttccccttgtgttggttgggttggttattggttattgacgattggttcttaagttggctgggttatcggcgattatcggttcacgatgtcttaatagtttccattgtttgattacttacactgtgagatattatacgcacttctgcatgttcgctgtgagcgtcctcaattacctttacctccctctgacgagggaggtgtcaccgcgcagcagtgacggagggagagacccgccagcgggaggaagctggtctcgctcagcctccgcgcgcttagctgccatgtgttcagccacgcgcttgtcccgctccacgaatgcctcacgcacttgttcagccgtcggccgaggccgccccggatggcaaatcgacatatatatggtgaactcagacaccaggtcaacgaattcgcgcgtgcgccgctcccccatttgcgagaaaatccagcaaattgcggaacgcatttcctctatcatccgatgagactgctcgcgcccggaatcagtgagattcacgcgaataatgcgccgatccttggaatcaatgtcacgcgtgacccagccttttttctccagagacgacagcacagtggagatgcggccggaactggcctgcagcgccgatgccaattgcgatggcgtttgcgtccccttcatggacagctcccggagcacgaactgctcaccatgggctccacgagtgaattccctctgcattgtcgaacgattgccccacacgctggcatacagttcactaactgcttcctgctcaaatcccataagagcaccatccattcccattcgccacacggcagagcgccgcaaacaccccaagaatatctcacaccgtaaacaattcattactagaaactatttttggaacgcataatgcacacactccacgctctttgatattctgaaagccgcatagatattcacttcggggcgtcgtctaagaatatttgctgggccaacggtagcgacgttggcattgtgctccatgaggtatctggtcgaaaaggcggacgaagacagaccagttgggcggagcgcgcccatacctcaaaaccattgcaattattggctttgaccattttcgtggagtcacgaaaatggtcatgaaaaacataaggacacacccatgaaccgcgacgaaatcacacgcaaaaccagcgaactcagcactatcgcacacaccaccgaggactccaaagttgagtattggtatgcacgcgagctaatgacctatatggggtacgacagatgggaaaacttcagcaaagctattacacgagccaagcaagcttgcgacaattccggcgtatccgttgaatcccatttccgtgacactacgcgagacgtgactctcggcagcggtgccacccgctccatcgcggacgtcaagctcacccgatacgcctgctatctcattgctcaaaacggtgatccaaagaaagaagaagtggcacttctccagagctattttgccgttcagactcgcaaaacggaaatcattgagcaacgcatgggagaaatcagccggctcgccggtcgagaggcccttgccactgcagagaagaaactctatccgtatacccaaatcacacacaacaaaaccgcacaagagcacatgtacacgcccaaccacgccgcagaacgccggcaaggatgtgatacaggccacagaaagcgttgtaccgcctaggcaatgcaacaattgtccgctatgctctgaaggcagatggcggcacggatgccatcccaaagagggggtatgaccatgattcggggtatgaacctatgcagcatcgccggctgcacgcacgaagcagaagaagcgggcatgtgcaacatgcatttcacatcggcgctggttcacggagcgctgcactacactgcgggcggacgtccgtcgcactgctgagcgcaacaacaaagcaaaacaaccagtaacgctcaacggcttccacatgttcatgctctaattgcatgtacttgcagacacaatggccggtctgagccagctgccctcgcatggagcagctggctcagaccggccattattgttgctttgtactgtttgcactgtattgcgcctgcattgcgcaagctcgggcgcactcgggtgcgctcgctgagtggcgtgaatcgcagattgctcaatagcaacgcaatccacgccactcagcagttgccatggttatgcgcggcgtttgcggatgacgagcaaggcaccagccgcagctgccagcaccacaaccacgaccgcaatggcagccacggcagcacccgtattcgaaaggggcgcagcgccattagcagccggcttattcgtggcagtgctaccgggcttagcagtgttgccaggattgttggtatcgccgggcttctgctctccagggccgggagtgacctccgtggccgtgaccgtgacttcgaacgtcgcgttcacgccacgataagagacggtgatggtcctcgtgcctgcggtggcagaatcaaagccagtgaacttcagatcaccatcagttggatcaatcagcttgcgcagcgtttcagtatcgccgactttgtaaatggcggataccttcacatcggcagcgttgaacttatcgcctacctgataggaatccttggtcacttccacagcaagctcagccaactgaggcagttcgccgaatgtcactgtgtaggttttcgccgtgccatcctcagcagttacagtcaccgtggccacgccgttgttctcggccgaagcctgctccacttgcaccgtagcctttgcgtcagcagcagtcgcctccaccgtcgggtaggaagcagcatctccagccagcgcaccggcatatttagtggtatccgcggagaatccgtcaaccgtcttgccatccacagtcagatcagcaagattggcgttactagacggctgcggctctggtgtcgcttcaccttcggcgatgcgtacttcagcgatcttggcatagtcattgccatcggcgtaggtgaagttgaggcgaatgcccttggtggcgggcagagcgctcacatcggcttccgtcacggctccagcagcaccattcacagtgactgccggcagcgtggcatcagtccacgtggcgctgtcttcagctaggtacgatacagtgaagctcttcggagcggcctcgcccttggccttatccaccgcaacgctgagcttgcccagctgatatgccttatcgaaggtgtagctgagccacggcgaggtgtcgccggtgccccagttcgaccagttggtgctcaggttgttgtcgcaagtcaggtcggccgtagaagcggaggcccagctactggccggctcatacttcgaggccgcagcggacgagcagaacaaccgggcaaggttgctttccacagtcacggtgaacgtggcggttactgaagaatcagcgacaagacgcaccgtcacggtttgctcgcccaatttggtggtgtcgaagccttccagcgtgtattcgcttggctccagcacacgcgttttgccattggtgagcgtggcggtaaccgtcacgtcccgaagcgcgagcatctgccccttggcgatagtggcttcagggtccttagccgcgatggactccacagcagcagtctgcgaaccgaacgcagtgccgttgaaggccacggtgaatgcgccggcattgctgttcgacgtggcgaagacaccggcatcgagcccggttgcgtccgcaccggtcagcgttaccgtagcgacatcctgccattcatcgttcgcggaagcacgccagtagcctttcagggtatcggttgcggcgcgctccagcttgagttgcacttggtcgccgaagccggcaccaacatgcgatgtttccttatcgatgtagccatcggcattggaatcgtactgcatgtaaatgccgcttgggctggcaagtaacgtggcatatcccttgccgccgttagcgtcagcaagaccgttacgaaccaccaggccggcacgcggatcgccattaccgcccaagtcgagcggcttgaccgtggtttccagcgtttcgttcacgtccagagcatcaggctggtacaccgcactgccctcgttgcgatccgtccagacgccacgattggcgttgtccgtaatcgtgaagtcataagcaccgccggacgcagaaacctggcacgcgctgccgcccttccaatgggcttccttccaacttccggaaatcgggttggagcaggaaacgtcgatggttctgcggaatgtgcggcccgggttgaagttgctgctctcggcaagagtgcctgtaatggtgtaggttcccggcacattgaatgcgtaggtgctgccggcagccttggtcgacttgctgactgccgtaccgccttccacattccatgtcaccttggtagcaatggtatcgtcgccttccttgacgttgacggtgtccggcagagtaacggttccgcccgtgttcacggtcttcgggagatcatcgccggtttccacagtccagttgaccagcttgcccttggcgctaccatggttgtcccaatagttcagatcccagccgtcgggctcgccttcttgagcaggattatgcatttcgatggtgccgttctcaccaatggtcagcggcagccaaacataggtggaatcggctttaccggaatcccaacggtcaccaaggtagatgaagtgacctttctcctggtctactgcgagcacactagccgactgcgaaccgaatgtggtgccgcgggtatcgcccacagacaacagaccatccgcgccttccggcatgttgttgtaccacgtgttctcgttggcatcgtccttttccacgccacgggtccagcttcccagcatggagtcggcggtgtagtaggtctgcttgttcggggcccagccggttgcaccagatgcgatgatgttgtaacgcccgtcatattggaatacggcaggagcttccagcgaaccattttgtttgacgatttggaaatcttcgccacgcaccggggcatccgtagtagcgtctgcaagaatgtatgggtactgcccgtcagcagagtactgcttttgtccctcggactggtccacattcgtggtcttgactacattggtgtaatcatcgttgagcttggcgatgtacagcgtggcattggcttcggaagaatacagtacataggcactgtcgtccttcgggtccacgaacacagtcatatcgcggctgtcaccgttctcaccccagctggggttacctgcggcttctttccaattgttctggttaggcaaacgataggcacccaccatagtgaacgggcccgccggattgtcggaaacagccacgcccgcaagtgcacgtgcatagttggaaccgcccggcgtggtgcttccatcggaatgccaccacagcacgtattgcttgttcttcttgttgtagatgatcttcggacgctcgaaaatgccctgtacggaatcaaccgcgccatcaccatcctgatcggggttggtgttgaggtacgggaagattgcgtcggccttggcagcgtccacactgccgtcggacttggtcaggttgtaggccttgtcgaagtaggcgtaatcggcattgctcttatccgtcaactgagatttgctggtcaccgcacgcagcgccacaccaagatcggtccagttgtatagatctgtcgacatataagcatggacaccggggctgttgtcgtaaccgttagaacggtcttcgccataccagtagtaggcgtcgccgaccttgaccacttggccaccgtgcgcttggatgtgtgtgccgccattatcattggcgttcttggcataccaatatggctggaagtaatcgctagcgttcttgcccggatcggctgtgggctggaacttggtgtatgtcggcacttggccgatggtaggcaggtaatccacacctgccgcactggcacttgcagcggccagcccgcatgacaatagcgttgccgcggcggtaattgccgcgataagagcgcccttgcccttatcgtttatcttcattgatttggttccttgattgatgataacggttttttgaacaaacagttatgtcgctatccgcgaagccagaaaaggttcgacaaatcaatataccgatactgaaaactcagtattcaacttgtcggaccaattatggtcaaagagcggaggaaccggccggcaatagtcaatattgccggcttgttccttcacccattactgcgcgagggtgctatgcacgcttgcgcagcatgaacagtgcacccgcggcagcggccagcagagcgacagcgccagcgatggcggcaacactggaaccggtgttggccaccgtgttcttgttgccgttgccggtggcaccgggcttgttggtgttgccgggcttctgttcttcagggccaggggcgactgcgttggccttgaccgtgacgttgaaggtcgcggtcacaccacggtaggagacggtaatcgccttcttgcctgcggtggtggagtcgaacgagccaatcgcaagctgcgggtcgtcaagagcgaccggcacttccttggtcttgtcgccactctggtagacggcagtcaccttcagaccggcggtatcgagcttgtcgccgatggcgtactcggtcttcgtgggtccgatcaccttgagcgaagccaaagtgaaggcgttgaaggtcaccgtgtaggtcttcgtctcagactcgtcggctgaggtcaccgtaatggcggccttgccgccaagcttgccgttctcaaccgcgtcgccagtcaccttgacggcggcggcattgtcggtggcgaaggcctgcagcaccgggtttgcctcggcgtcgaccggcagatcaaccgtgtagtcggtcttggccgggtcgaagccttcaacggtttcgccgtcaagacgcaggtcgcccagcgtggcatcggatgctggctgcggggtgagtaccgtgctgtcttgtgcgaacacctggatctcagccacgttgatgtacaccttggtgtcctgcaatgtgttagtcaggcggatggccttggcctttaccggggtgccgagcacgaagtcaacggtcggggtgtcggcggcggtgatgccgtcggagccagagccggcatcgccggcctgtatcttccagccatccttggtaccgactccatgccattcgccagcctcatcctggtattccagcgtctggctcttcggccaagacgcacgaccatcgtagtagaagaaggtcttcacttcggtgatggtctgagcttcgtcgaaggtgaacgtggcgaccgggtccaccgtcgaggcggtggaagcccaagtggaccaaccctttgacgtagtgtcaccatcgatggccttggaagcggaggcaccctcctggaagttcaccgagaagttcgtgccagaggccgcggcgatgttcttcgcagcaccctgaaccggcgtcacgaatgcctgaatttcggtggcgttcatgtagtcgttgttcacggtgttcacaatgcgcaccttcgtggcattcactgtgcccttatcggccttgaacgtcaccgtctggcctgcggcaggcttaacatcgctaccgaattgcatccacgtctcgccatcagtggtgtactcggccttggcggaagccggagccttgtcaccatacgtaatggtcacgctgctaagctcacactcagagccgaagtcaatcgtggcggtcgggctggcggaatagtcaccagcagagttccacgtcacccaggcttcagctgacgtgtcaccatcggtgagcttcttccactgatcgcccttgctgtattccgtctgctggttggtcacggtcaggctggaagcagtgtcggccacattctcaggcgtggcggcggtgacatagatcgtgcccttcagcgcaatcgtggtcgcgtcgtccagctggtacgtaccggtcacggcaatgttgtcgccagccttggcatcggcgagcttggtatcaagcccatcgaagttccacgtaaccttagccgcatcgccctcgaatgcaggcgatgccttgacgtgcagatacaccggcgcagcctcaagcgcggccttcgcctcgctcgcactggtgccggccagcactgtagccgataccggatcggaaacggtgagcgcgccaacgtagaccgtagcggcgacattgaactcgttgccgtacacatcggtggcggtagcggtggcttcgtaggtgccttccttggccacatcgaccttggaagtatcccagttggcaaccgtggccttgccttcgccccaggtgtagtagagcgtgacttcggtcggcagcgcggccttctcgttaacggcggtctgcacgttcacggtcttctggctggtcggcgttacattgcgtagagtccatgtctggttggcggacggcgaagtgccgctcggtgactgccacaagccaaccttcgtgccgactgtggtaccagagttatccacatcgaggttcgtcttagtcgcggcattgagcagctggtaggtcgaaccatcggaagtgttgagaatccacttggcagccgggtcggacttagcggcctcaaccgtttcgttggaaagcgcgttcgtgccatccttggacaccagcaccttgccttcggcgttagtaatcacataagccttgagatcagggcgctcggagtcggcgggctgctcgatctgggtaaaggtccaagtctgcttcttggcgttctcggcatcggaagcgacgttggccagggacagcgcggaatcaccagaagtggtatcagccacggccttgccggactgcttaccaacgagctggtaagtgtcgccggtctcgacggcagcatccttagcgtagccggtcacgccagtgagctggatggaggcgatagaacgggcgggcacagtgaccgtagcggtcttggcagccttgtcaatcatcacagagccttcagcttgcttgacgttgctggtcttggcgaagacttccggagtggcggaatcgacacccgcgttcttgtcttcggcagaggtttcggtggtcaggtagagctcaccgtaagcgttgtcggcaatctcgccgtacttcgacaggtcgatgacgaaggtctggtcagaggtgccggagttgcggtggatgacggtctgcgtcttgccatcgtcggaggtggcagtcatgttgttgtcttcatcgttgttggcgatgaccttgtcgcccgcgtggatgaagtgggtgatggccttgacgccgttgtacttggcgttggcaataaccgtgcacggttcaagtccatcggcggtaccgccgttgttgttcacgcgacgctcggagtagagcttgccgtccttaccggccacggtgcagtcgaagtcgatgagcacggtgccccagttggtgttttcaccggccgggttcacgttcgagcccatctgcatgttgtagaggtcctcgaccacctgccagaaggtgaagtccttggactgcaggcgggtgacgttggagctgatcttgctcatcatgcccagcgcgttgtcgaaaccgtacgggttgtaggagccggactgccaggagccgtccacctcgctcatcgacagcttcttgccgtctgcctgagcgatatcgcgcgattgcatctggttgctgtcggagtaggcgtgaacgttgtactggccgataaggtccttgatcgcctgcgggtactggttgtacgacttgacgaagtcggcggagttcgtggcatcggtggctgcgatgatggtgtcatcattgtccttgagcgcctcagcgagtgcggtaatcgtctgctgctgctgggcgttattgacatgcataccctcctgcggcttcttcagcgcgttggagtatggggtgacggacttatctttgtcggagtagtacttatcccagtagttgttaatgagcttggtgttgtcatcgctctcatcggtgtacttcgaagccatgtcgcccggagtgccccagtaactggtctcggactcgttgaacggctcgaccgtgtcaacgtttgcgccaaggctttcgaggtgctcgacgttcttggtcatgtactgagcgaatttctcagggtttgcaagattattgctaccagagttgtatccaccagtggcgtaaccgctgttggtcaggaaccacggagcggagttggcgaaggcctctacatcggtgatgtcggggttatcgccggtggcaccgcgctcaatccaccagtcttgggcggcggacttggagaagtcatactggttgtcgtcagtcgggtcgaatgccgcagccagcttgtctttgtcggcctgcttggtggttacgccattgccatacgtgccggagccggtggcgtcatctttccacgtgccaggcacggcagcgccttggcgcatgaatgggtagccgtaggcaacatcggaggcattgccgccgcccacgttgtagcgggccatgttcaggtccagtccttcatcaccgaagatggactggtagaactgttcgcgcagctgcttgccgtattccacagccttagccttggaagcgtcatcgccgagattggtggtgatggccgattcctcgccgaggctgccggtggcgttggcgaaccaagccagcgaggtgccccagccatcgaaactgttggcataccacgggttcggggtcacggtaatggcatcgttatcagccgcatacgcagtgccggcaaccgcaaacgcccctcctcccactagtgttgccgccgcaaccattgcagcaagcgatttgctcagtaccctcattggtctccttagtgttcctgctgtccgccttataccggaaaaatcggcctttgcttcactgagccggcctctttgcctgatacatgacctacgtcgactccttctttcggcgcagccaaaatgtttacgcaaacattttgatatgagcgattatatcacaaaaccgtcacccagcaaacaacttcagagaccacaaacgacgcacaaagtcatgagccattcgaattgcgctggcccaatcgctacgaatcatatttgccgtagcccttaagtgaatcccactgcatcgagatatcgcgcccgctatcccttccgataacgccgaccacgcgtgttgccttcagcaatcagctttccttgcgcaactaaaccgtttaggaatttgcggactgttctgttatcgagctctgttatcttggcgagttcaggtacagtcacatagtcaacctctgtcaagcgtcgattcatcgccgacagcatcgctgcccgcgaatcaatttcacccgatgcggttgcatctgctttcttaccatccacacgttccccgccaatgagcctcgcaccctcttcggcatctttctcaactacagatctcacgctagcaaaaccagaaccatccacggtcttcagcgcaggaacaataggaatcgtcgcctcgaatatgtcaccatcgcggaactcaggctctcgctcagtatattgccgggacgctcttatcagattccgcagtccgctacccagctgctcggctatgccggtctgcacaaacacattagcgataatcggattctttggcattggcgtgaactcgcccagcttcattcgaccttcaaagaatgagcgcgaagcattaaccgtccggatggattcattatcaatggtgacacgcgccaccaccggactggaatactcccgatgcatgaggctgtttgccaccaattcacgggcgatcatcgtacgcgggctcactcgcttatcgccctttaacacaaagcggtcaggcagattccgctcagtaaattcacggagttgctcgtacgaatcgaacaagttggtccgcaccataagtcggtcatcgtatcggtcaatattgtctcgccgaaccacggcatcagtaatatacgctgggcaaaccgaggaaatgacttcatccttgcccaagagcagcactgcagcaagattaaagccctcttcgccggtcgtgtaatcacgatcgtatagcttggcgctgcggaacagttcttcgtcagacatagttccccaagggtgcccagctcgctgagcgaccgccagctgccgcattcgcgcaatcagctcaggacgcaaatcaaacggagtcacgtaacggaaaattcgccgttcggaatagtagttctgcttgcgaatatacatttgactaatctggatatcgctttcgatgtgtgtatccacatcagcaatgcgatcaaacactgcgcccttgaaccgcacaaccgaagaactcggagctacccaaatacgaacaataatccgttcgtcgtactcgatatgttccgtttccaccattggagccggttcgaacatcttacgattagacactacgttgacaacgttgcgctctatctcactaacgcgcttagaatcgacgccgagcacttgaccgtcatcgtcaacgccaagataaatgctgccaccagaacgattggcgaatgagcatacagtctcaaaagtatccgtatgaggcaattcgctgcagcgcttgaactcgaccatagatgattcaccggcctgcagcacttgcataagttcatcctgcgtcatcgcattccgcccttcatagcgataattcatacattaggacatggcacttatcgtattttagcatctaattagtacattaggacattgttttatgtcctaatgtactaattaggcggctaattgtactaataattgcacactgatgtactaatccgatgatcgaatgcactaattgtccgcacaaatgcactaatcggatgaccgaatgtatcaatgagacctataggcagccgattggctgacgatcagcccagtcattggctatcggccgctagccagtcagccgccaacagccaacagccacccaaccaatagccgccagccaatcagcccgtccaatcactccttgtgttccagtgcggccttcaaatcgcggctacggtagcgttcgcgcagcatagagaatccaccgaagcccacaagccacaccaggccggcaatcgcggaattgcgcgtatcgtccgcaaggaacaacgtcaggtagatgaacacgaagaacacgattgccaccgtattgagcaccttccacgcgggcatgacgaacccgtccggaatgaaatcagcggagcgacggtacttgcggtgtgccatcagcgtcaggatgtagatgaacaggaacaccgcggagctggcggacgagaacagcacgaacgctccggacacgccggggatggcgttgacgatcggcgacagcagtatcagcgccgcggacaccaggatggcgcgggccggcaccttgcgatcggacaccttgccgagcttgttcagcatcgggttcggcgacacctcggacagctggtacaggtggcggccagccgagtacagcagcgagttcagcgcggaagatgcggcggtgatcaccacgaagaacaccagcgcggacgcccaattcagcccggcgtactggaacaccataatgaacggggaggcaaaggagccgtcctcgttcggcttgaacgaggtccacggcacgatgcacatgatggccacgagcgcgcccacgtagaagatgagcacacgcacgatgatctcgttgatggccttgggcagcaccttgcgcggattcttggtctcggagacggtgacgcccacgaattcaatcatctcgtaggcgaagaacaccatctggaagctcatgaggaaggccatccaaccgttcggcgcgaacgagaagttggcgaacaggttgtcgaatccggcgtggccggccgggctcacgtggtccacgccgtgaatctgcacggctgggtaatggtagccgatcacgatcatgaccacggcggtggcgatcatcgcgcaaatcagcgtgatcttgatcatcgagaaccagaattccacctcgccgaacaccttgacggcaatcaggttgatggagaccagcgacaccaggaaacacagctcgatcagccatttccaatgggtcaggtcgatgccgaacgtgtcgaagaaggtgatgaagtacgtggagacggccgtgatctcggtcatgcccagcagcacgagcgcggcccaatacgtccagccggcgaaatgcccccacccgttgccaaggtaacgggtgatgaaattgatgaaggtgtgctggctggggtcacggtacatcatttcgccgatggcgcgcatcaggaagaacatgatgacaccgaccagaatgtacacgaagatgatcgaggggccggttagcgagattgacttgcccgagcccaggaacaggccggtgccgatggtgccgccaatggcgatgaactgcacgtggcgattgctcaggccacgctccatctcgttggtctggtccaggctttcgacagacttgagtttgcccgtagcctgccgtgtaccaccattcacattcgtatcggccatactgatttcatttctcttctctgccgcccgattgttacgtaccggacgcgatactcgttcaaaacaagttcagactgtatcaccgaaatatgtcgcgaaaaccgctcagctcaagaatacatgcgatgatactgtaaatattcagccaaaaagttcaattcaccaacacctaattgaacttctacctctattccacggacttgagcgagctgaccgggtctacgcgatcgagcactgggttggtgaacagctgcaccagcagcgcgaacgccagcgtcgccaccacggcaatcgcatagctgtaccagtgcacttccacttcgaaatacagcgacggcatattcaacgcagcagtcagtaatccgcctatccacctgccaagcggcagaccaaccaccacacccataccggtcaatatcatcatctcgcggttcacgtagttgtgcacctcgcggtcatagaagcccagcaccttcagtgtggccatctcgcggatgcgttcggacacgttcgtattggccaacgtaaacagcaccaccagcgccaggccgccggcgagccccacaatcagcgccaccacggcacccatcaaatcgaacttaaacgtggcggccagatgcgcacagctcacggtcttgagcaccgacgattcctcgcccaaccgatccgcatattcggcctgttcggtctcggaacccttcagcttggcgagcatcgcgttccacgtcaaggtcgaggcagtgccatctcccgaagccgaagacgtcacaccgccggccgcaaacttctggtcgtacagtcgctcactgatgtacacatcagagccaataagattgcgcgtcacggccgtgacctgcaccttggcccggctgctaccgccattgcccagcgtgacggtgtcgccggcatgaatattcagcgagttggcggcggactgcgatacaatcacgccactatcgtccagcgctacagtgccgccacccgctttgccgaagatattgggcagcccaaaccatccatcatcgccagcttgttccagcgtgaccatatcgttcaagatattcagcgaatcgttgggcacggtcatcagctgcacggtttcgctttcctgcgccgcattgctcatctcgccactatccacgcgcagattcagcgtttcggtggtttggccatcttgtgccacctgcttgcgcatcgcggtggcgtcatcgtcattggccacgaccatcaggtcgtactggtagatctgctcgtattgtttgacgccaatcgtgtcgacggtgtcattaatcgcaaatccgcagataatcaacgctgtgcaaccggccacgccacccacggtcataatcaagcgcgacttgaatcggaagatattgcgcgcggtgactttgccgaggaagttcagccggctccataccgggcgaatccgctccagcaatatgcgagcgcccgctttcggtgccttcggccgcatcaacgcggcgggcgtgtgccgtatctcctcgcgacaggcgagcgcggtggccacgcccacgccgaccacgaacagcacgatgccggccgaaccgtacaaccagtcgtattcgagtcgcacaccgggcaatatatacagtccctcaatcaccaccagcaggaatgccgggatgccaaggaatccgaccagcagaccgatgccgccgccgaccaagcaggcgagcaacgcgaacagcagataccggctggacacggcgagtccgccatagccgagtccaaggtaggtgccgataagtccgcggtcttcctcgaccatgcgggtcatggtggtcaggctcatgagcacggcgaccagcaggaacacaatcgggaatgcgcggccgatggattcgatggaactgacgtctgatttgagcgagctgaatccgtcgatcgaagcgcgtgtctgcacataccaacgtgcgttggccacatcgtcgatgcgccgttgctgcttggcgaattcgctttccgcttcgcttcgcttcgcatcgagttcagactgcgcatcatccagtttcgccttgccgtccgcgagctgttgttcgccttcttccagctgccgctcgccttcttcgagctgctgcttgccgctggccagttgggcggcctgcgcttcaagttgcgccgactgggtttcgagggttgcggcattcgcttcgagttccgcggatttggtattgagctgtgcctctcctgcagccgcttcctgttccttggcggtcagttgcgcgttctgctggtccaaggtggattgtgcgggggcaatggtttcgtttaatgtgcgctgcaaatcggctttctgctgggtcagactgtctcgctgcgtttgcagttccgtttgcttggcggccagctgttgccgcagctcactgattgacggcacttcaggcagggtaatgccaaggcgcgcgagcagttgcttgatggcctgccatgtgggtgagttgaagtcgatattcgggtcaagttgcgccagtagattgtcggcctgttgaatcatggacagcatctgatcaatttgtgccacgccttggtcgatttgggtaatgccctgttcgattttcgtgcgattggcagtcagttccgtttgcgccgcatcgagctgtttgcgagccgaggtgagctgcgctttgcccgattcgagctgggtgcgcgcttcggctatctgctggcgaccttgcgcgatctgttgacgggccgatgcaatctgcgcacgtccatcggcgagctgccgttcgccatcggtaatggttgtcctgttgttctccaattcggtacggctatcttgcaatgtcgttttgttggcttccagctcggcccagttgtcgtcgatctgcttctgggcttcgtccagctgctcgttggcctcgtctttggcatcatccagtttgcgctgcgcgctggagacgatctgttgacgacgggctttctggcgtgtggcctgtatctgatgttcgatacggtcggccacggttttgatggcttcatcgtaggcatcggaaaacgtgtcaaaatcggacgcaccagtgacggcaaccgatatcgcagtgtatatattgccggtcacgccgtcgctgggtgcaaagaacgtatagtcctcggatgaggtggaccggaaggaggtcatgcccgaatagccgtctggattgttgaggtcgcgcgggtcaagtacgacgccggtgatggtgagtttcgtggggaactgcggggattgctcggcgtcggcgtccgtattggcggcggacttcgcatcggatgccgaggcattggcggcgacacctaccgtatcggcattattggaatcgtcattggaatcattattggaatcgtcagtctccgtggccgctaccgatatgacggatgaagaggtgtcttgtggcgtcacagtaatggtgccgccaatcttgagtccgctatcgttcaggaactgctgagtcaccgccacttcgccggccttgttcggcagtttgccttgttgcaggtacggctgatcaagcccttcggtaccgatttcctgcatggtcacggttttcttggtgccgtccaccaacgtggtcaccgtctgagaacgttcgggctgcacggtttgcacaccgtcgattcggcgcagtgccgccgcatcatcatcggtcaggccgtatgtggatagcacctgcaggtcatgcagtccctgctgatcgtaaaaacgaccggccgccagaaaagcatcgcggcatccggcgtagatgccggtcagcacggccacgccaagcagcgtaatgacggcgatcgagacgaacctcttccagctgcgcagccagcaacgcaacgtatctttggcaaataccgcagaaacgcccgctcctcgaccgccgctatcgtcgaggttccgccgtttcacagaatgtttcacaaatcgcctcgcttgtttcacggggcgtttcacagagtgtcttgcagtgagcatcgccaatcacctaccattcgatatcggcgatgggctgcggcgttgcgttgatctcctcgctggccaccttgccggagcggaagcgaatcactttatgagccatcggtgcaagcgcggaattatgcgtgatgatcatcacggtcatgccttgcgtttggcaaatatcctgcagcagctgcagtacttccttaccggtctcgtaatcgagcgcaccggtcggctcatcacacaacagcagcttcggctttttggcaatcgcgcgggcgatggatacacgctgttgttcgccgccggacagttgcgctgggaagttccccatgcgctcccccaacccgaccttgtacaaggtttccaccgggtcgaaatggtcggggcaaatctgtgaggcaagctccacgttttccagcgcggtaaggttcggcacaagattgtagaactggaaaacgaagccgatgtcgttgcgccggtaggtcaccagtccctttttccgcaggcccgtaatatcgcgcccgccgaccactacgcggccggttgtggcggtatccatgccgcccagaatgttcaatgccgtggttttgccggcaccggactgtcccagaatcacgcttaattcgccttgttcggcggtaaagctggcctcgtcgagcgcgcgaatcacactgctaccagaaggatattccttgaccacatggtcgaattcgatatacgccatcgcacacctccaacgcgctcgtggcagccacctagccccataggccccgccaaaacttcctgctatactcaagtaaaacaacactgtgtcggttctgcaaccaacagttggattgtgggttgtcggaatttggggagaaggccatggccaaagaattgacggaaagccgccgcacccgctacacgagacgtgccatgcaggacgcgcttatcgagttgctgcgcaatcagccgctcggctccatcaccgttaaagcgttgtgcgagcgggccgatgtgaatcgttccacgttttacgcgcattatgcgagcatcgaggaactgctgcacgacattgaagacgaaaccatggcctgggtcaccaccgcactcgaacagctactcgcccagccagattctgccggcatcgagcatgttattgagcgcatctgccagtacattgccgacaatcgcaagcatctgcaggtattgatgagcccgaaagcggatatcggcttccagcagcagctgctgggattgatttacagccagcgcggcgtaggcgaacagttgcaatcttcggcgggttacccagccgaggcgcagatgcgtatgcgattcgccgtgtccggcagcattgggcttttgcaatattggctcgccaccgatctcgcggcctctcccgaatcggtgtcccacaccatcttcaccatgtgtatgcctgccacgcagtgaacacggtgaattcagtgaactcagtgaagcgtgcggtttcataagcatcgctcgctatagcttcgcctgctcaccggccgcgcccacgcccgcgcttgcgatagcgcacaaatagacgattgaccatttctgagacgatacggcggcatagaataacgaacgttgcgcatcgcggcaagccccgcgtgcgccaaaacccaagaaatgtgagagaagggcacaatgagtactgctgatgcgcctaagaagccgcgcgaaaccgacgacgtgccggtgccggccacgctgcgcaagtcattgaagaaccgtcatatccagctgattgcactgggcggcgctatcggaaccggcctgttctatggttccagcgaatccatcgcgctggccggcccctcgattctgctggcctacttggttggcggcctcgcgattttcgcgattgtgcgtgcactgtctgaaatgtccgttgaggatccgaaggcgggcgcgttcagctactatgccacccgctactggtccaagcgcgccggctttatttccggctggaactactggttcaactacatcctcgtctcgatggtggagctgtccgtggtgggcaaattcgtaaactactggttcccggcgattccgacctgggtgtcggcagccgtattcctagtggtcatctgcgccgccaatctgctgggcgtctccaagttcggagagttcgagttctggttcgccatcatcaagattgtggccgtgattgccatgatcgtcggcggcctggcggtcatcatcttcgctctgcccaccgcatccggcatcaaagcgagctttgccaactggttcaccttggaagggggcttcttcccgaacggtctcatggagcagaccaaagacggcacctggaccggcctgttgatggcgcttgtcgtggtgatgttcagcttcggcggcaccgagctcatcggcatcaccgccggcgaaaccgaggaccctcgtcgtacgattccccgcgccaccaatgacattatctggcgaattctcgtgttctacattggcgcgctcggcgtaatcatggccgtcataccgtggaacaccatcggcggagacgatgttcccagcccgttcgtgcaaatcttcgattccgtaggcatccacgcggccgccggcatcctcaacttcgtgtgcctgaccgctgtgatgagcgtctacaactccggcctgtacgccaactcccgcatgctgtattcgctggccaagcagggcaatgcgcccgcgtatctgggcaagctcaacgccaagggcgtgccggtgactggcgtgctgacgtccgccgtgatcaccgccatcgccgtggtcgtggtgttcgtgtggcctgagttcgcgttcaactatctgatgtcgattgccaccatcgccggcatcatcaactggacgatgatcatgttcaccgaaatgaagttccgtaaggtggtcgccgcgggcggcgctcccgaggattccgagctggccggcaagtccggcaaggaagcgctcgacgcgattcacttcaagctgccgttcgccaaagtaaccccgtgggtggtattggcgttcctgacactggtcgtggtgctcatgtgcttctccgccagctaccgcgtcgccgttatcgccggcgtgatctggctcgccatcctcttcgccgcctaccagatcactcaggcgaagaagtaaggctccatttgcgaatagctctcactgatgagcactcagtgagagctattcgcaaatgggatttattcatgaaacagctcatcgatgccgacgagctgaacgtcggattgagacgccgcagcatcgtcgaccagtgattgatcgaaaccgccgagcgaaaacagcaggtatgttcgctggccgataccggttcgcgcagcacggtctcgcagtagattcagcacggaacggtccaccggcgcattgcggaatttgcactcgcccacaatggcagcatcagacgcattgtcaacggccatcacgtctatctcatcctgacgatcccaccaacggccaaccgcacgcgcacggaagggcaaccgtccagcagcactctcacgccacatccattcacggcacagaccctcgaacggtttgccggcaaaatcatgtaataccggcttgatatgacgctcgtatacgccttccacatcgccccgctccaattccgagcgatacggaaatacaaacgaataccagaatcggaagaaattgtcgttcagctgatacagcccacgcgaacctttcgcccgctccttaggcttcgccgtgactgggaactcacgttccacaatccccagttccataagattggcgagatacgacgatactgttgcgtttgccatcatcgtgtgtgtcgcgatctcattcagcgaagttgcgccgagcgcgatcgcccgtatcacgctgttatatttcgcagtttcccgcagttcttcgtgcaacaaaaattcaacctcgctgtatagcggagcaatgcgtctcagaatatgccgcttgacatttgcgtctatggtctcatctgggtcaaattcctctaggtaacgcgggataccgcccagtattgcgtaggccagcgccttatcctcgctactatagttggggaagaattgcgctgcatcccaatatggcatcggcagcatcttcaggatgccggtcgcacgaccatatagcggcgatttttctcccaacagctccttttcgatgaagctcatggcactgccgcaaatcacaatcatcagatttgcatgacgcaacgtgtggtcccaaagattctgtagcactgacggcaatgacggatcagatttgaccagataaggaaactcatcgaatatcacaagcctgcggccgccatcgctcggctctggcagccgggttaactcggttaacgccctttcccaagaaggatattgactcagataatccttgcccggggcacccgcctcgaacatgagacgggagaacgatgccagctgttcatctttagtggcattctgcgccgcgaagaataaggtttccttgtcttttgcgagttgaataagcgtctctgtttttcccacgcgcctgcggccgtagacgaacacaagctgtgccctacgctcagtgaaacattcctgcagttgccgtaaatcgctatctcgtccgatgaatgtcatactgcccgcccctctatgccatacgttggcgaattcctattcgcaccacgatttattgtatcacgattaatataatcgtgattatataagatgcgggcggtgcggactcgggcccacttgcaaaagactctcactgaggagtgctcagtgagagtcttttgcaaaatcaggccactcgttgcaaatttctctcaccgactcaacgtcagtgagagttttttgcaaatgaggggtcagatacggcgcttgcgccagatggtcagggcgataccggcggcggcgaggaccaccacggcaccagccacgccgaagacggcggcaccagtgtcggagatgacggcacccggcttcttgccatcagcggagaccttcacgagggccttgcgggcctcggtcaggtgacgaatcgcatcctggacctcggtggagatggcgttctccttggcgagcaccttcttcgcttgggccagcgcatcggcgtaggccttccacgaatcggcggtgtaatcgccttggttcagcttctcggcttcgaccttggcaatggcgtcttcgagctgcttgagctcttcctcagcggccagatcgggatccggagtcggcgtctcgtcggcaacgaccttcacggtgaacgtggcggtcttggtcgaatcggccacagactgcacggtcacggtcaccttgtcggaggccttcgaggagtcgaagccgagcagctcgtactcatcggcggcgagctcacgggtggtggagccgccgttgccatcggccacggtcgcggtgacgaccagaccggcagcgtcgagcgcttcaccaaccttgtactcggccttggcgggctgcgcggtcacggcgatggagaggatcgtgcctgcggccgggtgctccggctcgggctggctctcctccaacgcattctgcgcgtcggtcagggccttggcggcggcatcgacatcagcctgagacaggccggagtcaaggaaggtctgcttggccgtcttggctgcggcgagcgcatcctcgaatgccttccagctggcctcggtgtaagcagagccatcggtgccgagcttgtcggccgcttcaatcgcgccatcaagcgccgtcgtatcggccatctcaatggacacgccttcgtcggtcgggtgaatggtctgcatcaggccgtccgcgtcgaaggtgatctcgtcgatggcggtttcacggtggtagccgaggccggaggtgaacacgccgagcggcgtgtagtggcgatggtaggccatgagccaacggtcgttgccgtccgcgtcggtcacatgcacgtcggactggtgcgcggtaccttgcaggttcttggaggaatccttctgcagcagcacacccttgtaggtgatggtgccgtcgatggaatcggagacgccgtacctcacatggtagttcggggagttggcgtcgtcgcacgaccaggtccagtggtacttgccgtcgcggtaggcgacgaccacggactcgcggaagccgttcagaccgttgagcttcttcaccgtaccggccttgatgctcaccatgtcgtcgttgagttcggcgatggcgggcgaaccgttgccgtacaggatgtacgacttgccggtgttcgggtcggtgaagatggacgggtcgatggcctgtccaacggtgacgccttccatcgtgcgagtgaccagcggttggtcggcggccttgtacgggccggccgggttgtcggccacggcgacgccgatggcggatgtaccgttcggcaacttcgcgcagtagtagaagtagtacttgccgttcttcttctcgatggtcggcgcccacgcggagcccacggaccacggggagatggcggtgttctcatcgccatcggtggtcggctggtggtccttattgacatcgaggatcacgccctcgtcggtccagttcaccaagtcggtggagctgaacgcatggaagtagttgccgctccagccggagaagccgtcggtggtcgggtagatccagaacttgccgtcgaagtagtcgatgtccgggtcggcgtactggccgggcagtaccgggttgttgcccacggtgaccttcttcagcgtccaggtctgcggcgcaccgtcgcccaaatcaacgaccaaagtacggtccttagccaggtcggccgtaccaccattggtgaacgcctgaccatcaagggtgagcttgatggagtcgtcgctacggttgacagacaccttgacgggcaccttggtcgcgccgccacggcggttgagcacggtggtgacggtcttcgtggaccagtcgagggtggaacggacctgagagtggtcgtcagtgccacgcagcgagttcgggtcggacggcacagtgcccacagaaataccctgcagagcaatcgggctggtcttctcgacttcctgagcagtgagcgcgcggttccacacgttcacattgtcgaacgaacccttgaagtatgggtcgttgtagaaggacttgcccaagtaggccagcagatcgttacccaaatcggtgaccttgttcttggtcgccttgttctgagccacctgcgcaccgtcagagtacacggtcatcacgttgtcgtccaacgtgaccgtgacacgatgccatgcgccgttgccagacaacgtagcgttagccgcgtcctccgcaccatacgagttggtggtgatgcggctggcgagctcgccggagttgttgtacttcaggaagtagtacttggtggagttctggccgaaagcgaacgtgaactggtttttattgatctccgacttgacatccatctgcacagtcagcttgttacggccatcgaacaggcccttcgggaactcggcgtaggtgccgtcagagccgtcgagcttaagcaccttgcccttttcggcatcctcggagaccttggcgttgccgttgaaggtcaagtcgttgctgttctcagtggtgtcggtacccttgctgtcttcgaagtcatactcggcaatcggaccggagccgtcttcatcgggtgtgactggctcggtgtccttgttcttatcgaatgccttcaggattgcgttgtactcggtttcagtgacaggcaggatggtgccgtgacgcttcttgagcgaaccgaagttcacatcagaggcaaagccccaatcagccttatcagtgctgcctaaatcggcagaacggtatggggtgtaacccttaccggctgagtactggtcccacatcagaccgtagagcatcttcttgcccgcatcactggtctgcacgtcatcttcattgtagaagaacagctccgggccttccagctgcgcaccggtcagaccggtaccagtcaggtcaccgaatgtaccgacaagcgtccactggttcggatcactgtcagtgttgtagtaaccattcgcaattgtgtcaccagtggtgagcgttgtggcatacggatccttgctacgctcaacaccgaggtacgtgtcaccggacacacgatagtaatagccgtcatcggccttaatcatcgtggtatcgataacggacttgactcggtcgatccacttgacaggcgtcgtgaagttcacgaaatcacgcgtggtggagtagtacatattggtgcgatcgccggacttgttgtccgcgtcggaagcagtggcccagtacaccatgtactgcttgttcacatcatcccagtaggcttccggagcccaagccatgccggctcccggaatctgagaggcaacgtcaacggcgcgcggttcgctccagttgacgaagtcatgcgactcccacacgattaggttggtgctgccattggtggtagcggtggccgcgccccaaccgccacggttatggatgctcagctcggtagcgatgaggtagacggtgtcgccttccggagagcggaccagatacgggtcgcgcacgccgttgtccttaccacgagagttgccggtctggctgttgttccagctgagtaccggatcgccggactcgcgggtgtcatgccagctcaggccatccttgctggtggcgaagtacatctgctcgtcggtagcgctaccttcggtgccggtgaagtgcgcaaacagatagtccgtggtcttcggctgttcgacggcggccttgacggtcagctcgaattccttggtttccgtgttgccgtcagcatcggtaatggtggcagtgagcgtcaccttggtgtcggttttctgacgagcaacgacaccagctgcgatgtcaccatctgccgcatcggtaatgacctttgcgttgctggatttccacgtaatcgcggaaccgttaaccgagcccttggccggaagtgtgatgttggaatacacatcagtgctgccgttgttaatggtcagcgcattagcgtcggccttggcggcatcggacttcgtggaatcgtaggcttccttgatttggtcagcagtatgcgcagagccgtaaatcttgaggttgtcaagtgcgccggtatagtattcgccattcacccagttggccttgccgatctgcagcacgccgccgtctgcgccgagaatatcggtgagctgagcgaagctcgcgccatcagctggggctacggttgcggcctgctcaccgtcaatgtacagcgtggaagcggcctcgtcgatgaccaaatcgacgtgacgccactggctggcgagaccatccttgctcacattgccggtggtgtcgcgcttaccagcgttgttgtaacgctcaacgttcaccgaagtggtgcgatccatcacgccgaggtaatgctcttgctgataggtctgcgcattcgtattcggtgccgcaaataccgaccagccctgattggtgctggcggacttggaatcgtacgaaatcgtgaccgcatccaggcccttgagcacagccgaatcatccgacttagtcacattcagccagaagccagaaccgagctgaactgcagcagtgccgtccttgctggcagtcactgcggcagcaccgttgatggtcgccttggtgccggtggtgtcatcgacaatagtgccagtagcgcctgcagcgacgttatcgaaatcaagactggcgagcagatcactgtctgccgctgccttggcatttgatttcagggctgctgccagcgcccgctgcgcggccgatgaatcggtggtatccgattcaaccgcattcgctgctggcgccaacgccatcagcatcgggacaactgcaagagctgccaccgctttcttccacctacccatgtgtctcctctgattgtgggttttggttttgtgttgagttatggatcgaagttattgaccaacggtgttcagcttcctgaacaggaaacaaacatcgattttgttatcaaattgttatcgtgcgataatcgaccactcctttatcggtcgggtttcgcacctttttcgcactaatggagctgctttgtttgtcagcgcgaactgtgttctcatacggccatgcgacgccttgcccctcgaacgacaccgttttgagggactggggcgatgcaaggccgctttttttagttgtaagtacttacaattttagtgttaacgttcactttttgtgcaagacgagggagctcccctcagtccgctgcgcggacagctccccgtccacttcctgctggtcggcggagctctgcaacacctgctgcgcattggcgagcgcggcggcgaaggcatcccaaccagactggtaatcagccttgttatagcccttcaccttatcgacaagcgcctgcaacttggactcgtcaagggaaccctcagtgggaacgtctggctcagcaggcttcagggcactcatggccgactccaactgttgggctgcggcatcgacatccttctgcagagctgcgtcatcgttcagaaccgtacggaccgcaccaagggccgcttccaacgactcccaagaagtcgcctcatagtcagatgccttcgatccctctgccttggcaaccaaatcgcttagcgccgtcttgtcagcgccgatcttccgcaactggtacgcgggcaagatggcttcccggctatcggctgaatcatcggggttgcttcccgcaagcgtgagggtcttgctggttcccgatgcgatgaacatgccagtgacgtattgtccggttccgccagcggctttttgactgttctgttcaagcttcaccatgccaccaagatcggcgatattcgtggttttgccgggattgtagttcttgccactcgtcgcgatgcggcaatcattggtccagagctgaatctcataacgctcacccggagtcagattattaagcgtcagcacaatgccggcacgctccccggcagagttcggaatggttcacgaagcatcaccattcgattcgttgaaccatgcgcttcccagcaagtccccgtattccttggtcagcgaagcgcaagccccagtaccgcaagaggcataaccattccacgccccaatttgattatcggaagcgtggcgatatccgtagtccgtgtaggttacggtatctccgttccccagcgtatatggaaaggagttagagaaagcctctcccgcgaacgtcacaccgttgaattcatgagatgcggtgtctccacccatattgaggatgggtgcccctagttggcaggcaggagggttcctctcagtccgctacgaggacagtccgtccgcaattgcggacggactgaggccgactttccgcccgtgggactgtcggccttcgttcacctacaaacgcctctggcgcttgcgctggagggtcagggcgatgccggcggcagcgagcgccacggccacaccactcagaccgagcacggccgcaccggtcttggatagaccgaccttgttacccgtcttatcgtccacagcaccagtgtcaacgctcgagccgtcgcccggcttagtcgaatcgctcgagccatcgcccgaatcggaaccgtcgaccttcaccaacgcggcctgcgccttgttcaacgcggcggttgcgtcgtcgacgtccttctgcgaagcgttctcgtcggcataaaccttctcggcggaggccaacgctgcggcgaacgccttccacgaggcggcggtgtagtcggactcgcgcagctgcttggcggacgcgagcgccttggacaggtcggtcttgtcgaccgtaaccgtgtcgtcagccaccttcactgtcacggaaacggtcttggaggccagctcctcggaagagctcatgtcaaacaccggcataccgtcggcggcccagtgcacacggcgcacgaacatgtcgcggccggtagcattcacggatccgagattcttcgtagcataggcgtggaacacgtagacctggttgccgtcctcgtcctcgctccacatgccgtgaccggtgccaagctgcatctcgccgttgaacggaccggacttctgaatcgggtagttgagcgccgtccagctggccgggtcggtcaggtcggagccggcggcatcagccacggccaaaccggtggtgtaggtcttgcctacgccggaaccggagaacatgaggtacagcttgccgtcgcgcagggtcacgttcggaccttcggctatggcggcgttccacgcgtactccggggtgacgatgcgcaccggggagctggtcacatgggccgggtccttcgggtccatcttggcaatgtaggtggcgccgagctgctgccaggcgtagtaggacctgccgtcggcatcctggaaataggtcatgtcgagcgacatgcccactccgccggacgcggtggccgcgagctgcttgttaccgttgagcagcgaggcgtcattgcggtagatcggtgtcggcacagtccagttatcggggtcggtcggatcgaggtcgtgaccgtcgacatcctgcttgagctgcatgtacaccgacttgccgttggaccatgtgttgccgtatccggccatgaacagaatcgtgagcctaccatcgatctcatgaatttctggagcccagaagctgtgcatgatggcattaccctcggagtccttgtcgccagccttgagcagcgacacctccttgttgttgtagccgttcgactgaatcagggcattcgggttgcccggctcgtcggcgagaccggaaatcgtgtcggccatgcggaacggcatgtggggcgaaccatgctgccaagtgacgtcaccttggatgtcgttggaagcgatcatcaggaacttggtttcggtggcttccttaccgtcgacctcatgcgtccactgccacttatacaccgatggatcggcgcggtcctcggcgaacggaatctggtattcggtctgcttgacggtgccggtgacagtgtaatcacccaccttcgtcagatctatgccctcagtgttccatgaggaaatcggcagggagccggtagaaccgtcggagtaagtgaggtccacgttcttcggcagttgcgcggtcacctcatcgattgaggtgcccttcttgacggtgatgtcagtgagattgctcgtgccggtgttctcagagcggccgtaacgggtgttgagcgccttcaccgtggcctcgtccaccgcgatggtggcaccggagcggaagttcgcgatgccctgcacaccgtcggcggcgagtacgccggacttggcgacggaaccgtacagtacgctaccgtgcttggatgtggagcccttgagcgaatcgaacgtggtgtacttggccacgccgttgtcatcggcccagccgacgacatactgcttggcggcggtgtcgtacacggcgtacggagcgttgacgccgttggtctcgccaagatcgatgatggaaccggagttctcctgttcgctataggtgagcaggtcttcggaagtggcgatgagcacgctggacttcgcggtggaatcaccggtggcggtgccacggttagtgcgcacggaaatcacaccataggtgccgtcggccatgcggaacaggctcggatccttgagactgcgatagtcattgccgtcaaggttctcgttgagcttctgcgccttcggcgaacgtgcgaagaagataccatagttctcgttgtacggggtgtacgaaccgtcagcgttctgcaacgcgaggtgcatgctgtaggcgacgtcgccgttgttggcctcattctcgccggtggcgttgcgatcataggcggcgatggtcgcggacttcgcggcgggcagcacctttacggtgaaggccttggtaatgggctcgatgccggcgagaccgttcttggagaactcgacggtgatggtaccggtcgtggcctcgtcgccatcgatggtgatcttgccattctcgacggctacgtccttagtggacgtaaccgtggcggtagtgccattcacagccgccgggagggcgtctccggaacgcacgacggacgggatcacgtagccggccgcggcttccttgagctgttcagcggcagttttcgtggtcgggttgactgtgaccgtgaattccttcgtagcggtctggccacggactgtgacggcggcggtcagcgtgacagtcttggctgcctcgcccttggcgggctggttgactgtgccgtcagtcgcgatgacgctgctatcggaggacgcccacgtcacgccgttcgcagtgggcagcgaaatgaacggatcgtcgaccgtcgtggggatggtgatgccgttcagcacggaaccggtgagttcactggcatgaattgaggcatcggcagtgctgatcgcggcgacctgatcggcggtgagcgcggcatcgtatacgcggaagttcgagaccgcgcccttgaacaggttgtcgggccacggcgaacggccgatggtgttgagcgactggtccttgacgctggacagtttggccggcacggtgccggatgccacctgcgtgccgtcgatgtacagtttcgcggcggtgccatcaatggtggcggtcaccgacaaccattggtcggccttggccacgcaggagctggactgcacgagcgtctccgtaccgcccgatttcaggccgacgagcgggttacgcgaactgccgcagttgagcgtggcgaagaaatactccgtatcggagctgtcgttaccgatgttccacaggaaatggaaagcattgagcatgctggaatccgctttgacctccaactgcaccgtggcggcgtccttgccggacagcagattcgagggcaacttgacccagtcgccggtgccggtcttggcaccgccggaaagggtgagggcatcatcggcccaaagcgagtcggcggagttctgtacttcggccgcgccaagcgtagcgttcggcgcactgttggccacggtcttgccgtcacttggcttcgtggtgaagtcgtaggcggcgatgagattatcggtcggaacggtatcggccgcgaccgccgtggtcgcaccgattcccatgccggcaagcgccatcggcactgccagcatcacaccgagcaggcgcttgcctatcgatggtttggttgtcattgcttctccttcttgcgcgcggtgatactgcttgccgcgcaacagatctagatattgagtggtgaagttcggtaatggctattggagctatggggccataaagcctatgcgtccgacagcgtcgtcggacgaacgtgcaatacgccccctctgatgggaccgcgccatgaagcgaacaatccagtaggctgcttgctgtacggctcggcccgtcagagggggcttggtctacgctgcaagcagctcaggcctggcgcttgcggaggatgtaggcggcgccggcggcggcgagcagtgtgaccgcggtgatacccgcaccgaacaccgaggcgccggtgttggacagagcgctgtccggcttggtggcgggcttttgggcaccgtcgtccttgccgtcggtcttgccggagtcgccggacttcttgaccagcttgtcggcggcggactggagctgcgacagcgccttgtccacttcctgctggtcggtggagttctgcaacacctgctgcgcattggcgagcgcggcggcgaaggcatcccaaccagactggtaatcagccttgttatagcccttcaccttatcgacaagcgcctgcaacttggacttgtccagcgtggagccgggctcggcggccttgatggtgaacgttgccgagacagtaccggagtacttgccaacgccggtcacggtcaccgtggcggtgccgggttcgacgttgttcgtataggccaccgtgtagtcggcgccttccttgagcgtcgcgccatcgagtacaacggtcacggccggctccttggcagcgccgtctgcggtgaactcgttgggttcgacggtgacggtcgccttggagaggtcgatgccgttcacaatgacggtagcctcgaccggcatacgggaatcgtcttgggcgatgcccttgacggtgaaggtgccggtcttggcgtaggaagatgcgtcaatggcatcccactcaactgcaacgtcagaaacggaaccgtccgcatgagtcagatgcgcggtctccggcagcgtcggagccacaccaaccgtcgtctcggcagacagcgcgtcaacggacttcacagccacagccggagcgtatgcctccagcaccttctggtactgggcgcgggtcacgggcagcacggttccgtggcgcggcttgccgccatcggagttggtcgggaagttcgcctcaggcatcttattgccgataacggtccactgaccgctggcgatatcctcagtcgccatcggcacatagtggtttggaccttgatgatagctcggctggtcggcgaacaggtagtactggtagccgttcacatcgccatcgttggccttgaatagcgatggaccttcgccggaagtgaaggttttaccgtaaccgttagcctggcctttaccgatgttcgtggcaacttcgctccatgcactatccttaagcgcatcggcgtagttcttcacgccggcaccaccaattgcggcagtcaaatctgtggacttctcctgacgcaaagacatcgtgttttcatctttgtagatgcggtagtaggtatcccctaccttttgcacggtcacatcgatggatccactgcctgcaccgcctcggcgatcaacgttaatccacactaccgggtcggagaagttgacgaagtcatcggtggtgacgtacaccatgcggttgtaggtcagctgcttgcggctgttctcgtcggtgctgtcgtacaggttcgaggcccaatagaccacgtacttgccgatttcctcgtcgtagtaggcctcaggcgcccaagtgttgcctgcgtaatcagagctcaccttgacgtggctttgcctggaccagttgaccagatcgtcggacttccaaatctcaatgtacttggaaccgttagcctgtgcaccagcaaagccattcagcccgttgaggggggcacgaccgtcaatcttcagatcggtagcaagcatgtagaacttgtcaccatccttggacttcatgatgaacggatcgcgcaaacccttctcgccaaactcggaagtgaacagcggagtgccattgttcagcgtgttccagtcgagcgcatcgttgcccttggaagccgcgaggctgattttctcgccgcccacgccctcgccggtgaagaacgcccacacgtaggcctcgtccttctcttcggcggcaggcatcggctgaatggtgacggtgaaggtcttcgtttcggtggcggtaccgtacttggcagtggctttgagcgtcacagtggcggcatcgcttccggcggcagggcgcttaacagtgaccgttcgagatttgtcgttcacgccttcgcctagtgtggcgatatccttgtcaccggtcacttcccacgagatggtcgaaccattgttgcccttggtgggcacggagaagttgctacggatgtcgtcggagtcctcgatggtgacggcgtcaaggtcggccttggcttgctcggcatcggagaactgcttcggcacgaggaccgtgtaggcggcggttttggcgttgttgccgaacgtggcggtgagggttacctcggcatcagctgcggttgcggccggacgagtgactgtggccttgccggtagcgttgtcaacggcgatggctgcgttgcccgacttccacgcaatgctcacgccagcggcgctggtcggcagcgcgaagtcctcggtagcggatgcgggcacagcggccttgacagcggcctcggccttgtcgagcacctgagcgtcatacagcttggtcacgtctgcggcgctgatggcagtgtcgtatacggcgtaatcgtccacgtcgagcttggagttcgggtcagcgtaggaggacttgccaatgtaggcgacgaggtcgccgtaattggtcaggccaccggccggaatggtgtaggtggcgtctccaacctgcttgccgttgaggtagaagctcatggtgctgttggtgccgctgatgacggtggtgtacagagccaaatcgctggtggccttggtgccgatggtggcggcgttcgtcgatccagggccgacttcggtgccccacgggctgttattcgggtcggccgcagtggcattggtcattacggatttcgcgtagccactcgggttggccgggttgagcagccagtagccgttggccggataattgccggtcttggccgcgccgatgtacgcggcggcggtattgccgttgccgtaattgttcttgagccagatggagacggtaacgtccttcttaccggcgatggccgtggtcggcacgctaatggtttgcgagccggtcaggttgatctggccattggccaccgtggcgtcgccggatagggtggcatcgctgttggccgcgctgccctcgttggcgatggtcttggacgtcagtgcgttatcgaatgaatagtggatgatcggactggcgtcgattggcgatgcgctctcggcactggccgtcatcggcagcaccagaccagcgagcagtgttgccacgccgaccgtaagtccggttgcctttcgtatcagctttctcatgtttctcctcattgatagggttgattgtggttgcgcctccagttatgaggcacagttttgaaattgttcaagttatggtgatactaggtgcttcctctccgtccgtcagaagccgactgagaggaagcatttgaatccgctcaggcgcggcgcttgcgccagatagtgagggagatgccggcgacggcgagcgccaccacggcaccaccaaggctgagcacggctgcaccagtctcggacaggtcagcgccgggcttgtcgcccttgttgtcgcccttgtcaggatccttgccggtgttcttgtcaccgttatccttgccggaatcaggatcggtcgggtcttcagggtcaggagcgacggccttcttggtgagcacgaccctgtagaccttgacggtcgtgccatcctgcgtggtcacggtcaccgtcaccacgttgtttgccacggccacagtggccttggcgttggcatcgtttgccacagcctgcacatcggcatcggtcaccttgctcggatcgtcgacttcaagcgcggcaccctcagtagaggcagccgtgtcgaggtcgatatcggaaccgacaacgttcagcgacttcagcgtggcatcagaagacacctggtcctcggtcaccacgaccttcagcgtcacgtttttcttcgactggtcgagctcctcgctagtggtcatgtcgataatcggcgtgccatcggcacggaagtgcaccggaacaacaccggcatggcgagccgtgttgttggtgccactggtcatcgcgtgatacacgttgtacgtatcaccgtacgggtcagtgaagtaggagttgtggcccaagccaaactgaccggcgaaagtaccgttgtgcaaccacgggtagttggacttcgtccagctggccggatcggtcaagtcgtcaccgacatttgcgatgagcataccggtggcatactgcggagtgaccagctgcgcggagaacaccatgtacaccttgccgccggagacgaggacgttcgggccctcattcacgccgtccagctcccaaccccattcggggcgcatgagacgctgcggctcggtgatggcctgccacggcttgtccgagttgacctcggcaatggacacgttggccttggcacccttacgctcctgatcgccttggctccaagcaatgtacgacttgccgccagcctcgaagtaggtcatgtcgatggacagaccgtgcggggacagcacgccgccatccttggcctgcacgcgatgctcaagccagtcggcggtcttggtgggatcgccgccatccttgagctccatcacgtaagcagatggaccggcccagttgggagaattagtgatgttttcatcaccagccttaccggccgggaaggtagcgtagaagcagtatagcttgccgttgataacgtgcagctcaggtgcccagtggtaacccttgtgccccaaaccatcgttctcgccaaacaggtacacatcctgaccttcgaccttgtagccgccttcagttgcggtgccggccttctgatccttcagcccggcgagcgtatcggaggatcggatgaacagtgtcttcataccgccggtgtcggaggtgcccatggcgtagtacttaccgttgtagtacacgatgttcggatcggcgcggttgctcatcatcgggaactgctcggagtagttctgctggttgatggtgccgctgatttcgtaagtaccggcctcggtcaggtcgatcttgttcagatcgtcctgattccagttgacgcggaagtcgaaggtggagccatcggagtaagtggcggttgccgtggcacccttggagaggttgccgttgtcgagctctgcgccgccgttgatctgcgcgagcaggtcatccttggtggtcttgttggcctgcacggtgatgtctgtcgggacttccacaccagtgttgtgcacgcggccaagcctctcggtcaggctgtcagcaacatccttggtaagcgcgatggcgttgccgctaccagcaaccgcattatcgataccggtcaagtcagcttgcgcgcgctcgaagcctacgccgttcttgacttcagagaaggtcttaaagtccttggtcgtcacgtacttggcaacgccgttcaccttccacgagatacggtattcgcctgcggaagcgtcgtatccagctgcgatggaaccggcatcaaacagagtagcgtcagaggtgaccgtaaccatgtcgccacgctcgtcctcattcggcttgccggaccagtccgtcagattgctggaggtagagaaagcaacctggccgccatctacgcgattgccgttcacatcagtgaacactgccacataggcgtacttgccatccttcaactggaacaagtacgggtctacgagaccacgaacttcagtggattcagtgtttgcggttgcgttgatcttcgcctcggcaaaagccacaccgtagttggtgttgagcgcagtggtcgtagtgccgttgttcagcgccagatgcaaggcattgcccacgcgggagccaccgttgatggacctgtcgcgagtgtaggaggagagcttctgggcgctcttcggcataacgcgcacgccggtgaacttctttgtggtgctggtggtgccgagcgtaaccgtcgcagtaaggtcgacggtcttctcagcgtcgccgtctgcgccaacgactgtgccatcgtctttgacgaggctcgtgtcggaggacttccacgtcaccttcgcatcaggggccgcagcaattgcagtcggcagcgttgcgccggcagtgagctggtagtcgaccagcagtcgttcggcggctgcgtcggcggcggtgatggccgcagccacgttcaccgtgaatgtcttcgtgtattcgatgccgttgaccgtggacttggcggtgaacgtcacatcggtgtcttgggccggggctttgacgagtgtgccgtcgttgccgagcactgcggtgttggacgaagaccatgtgatcgtgttgccgagcgcatccttggcaggcagagtcacgctgccttcggtggagccgggcagggtcacgccatcccacaccatgccgtcggaaacgtaggcagccttccaaatcttgatgttatcaagaccgccgttgtagtacttgtcgccggcccatgtggacttgccgaagttcatcggcaggtcggtgccgagctcggagagcttcgtggtcacgttcttgttgatggcggcaaggttgccgtcgatgaacgtggcgatgaaggtcgggctcacggaaatgcggtacgtgtgccacacgttcgcggactgcgtagcggtcacgccctgctcgttaccgttggagtccttggtgatggcagtgtacacgctggttgggcgcagacgggagaagaagtacttctggttgtcggagcctatggtgaacgagaagaagttgtcgttcgcagccatgcgggacttcgagtcgaactgcacggtgaaggagtcggtgccattgagcagaccgttcggcagttcgaggtattgaccatcgttgcctcgcaactggatggcgttgccgcctgactgatggtctccgggtacgccgtattcgacattctcgcccttgacggtcaggtcgttattgttgccggagatgtccttccctttatcgttggcatcctcaaaatcgtaggatgcgacgagattagcgtccgtcagacctccgtcgttgtctgccgccatcgcggtgactggacctgaggccagtcccgcaatcatgaccggtagcgccgctatcgccgctaccgttttcttccacttgcccatatatttctcctcattgaatggtgggggtggctgagttggttgttgagttgtgaagtgtgtttattgggaaaccacgtttgttgggctcccctcagtccatctgaggcggactgaggggagttgtgcagactaggcctgctcagtccttgcgcctgcgccagactcccagaccggcaccagctgcggtgagagcgaccatggctgcgccgagggctagcacggcggcaccagaggacggcagaccggagtccgcccccgtaccagcgttaccgttatcgccgcctgcaccatcgccggaaccgtcgcccgaaccgggcttaccgggctcggtcttgacactcacggtcaccacgaacgacgtggtgagctgatcgttggccttgagcgcgacggtgacggtcttggtgcccacagcggacatgtccacgtcgccgaccgtgtagtcggcagcatcgagcgtcttcaccgtgccgtcggacatcgtcgcctcgatcacaagaccatcggcggagaactgctcgcccaccgtgtacttggtctttgtcggctcgctcttgacgcggatgccggtgatggacggctcaaccggcgtatcgggctcgcctacggtcaccgtaatggtcaccgtgcggttggccggagcgacctcctgatccttggtcagcgacatgtcgagcatgccgttggcgcgcacgttcacggccttgccccacgtattgcggtcctgatcgaacaggccacccgccgcggaaccggagtgaatttccgggtaggggcgtgcatggtaggccatgacgatgttgccggcctcatcatgtgcaagcgagatgtggccggggccggcctgcttgcgctcgtacgaggcctcatccgcaccgtaggtaccggtgtaggtgtcgttggtgtcgaacgacgggaagtcggccgtggtccagctcgacagatcctgcaggtcggcattcttggcggcacgcatcacgttggtgttgtaatacttatccaccgtggcacccgcataggcaatgtagacgtagtcgccatgctcgaacatgaacggtgcctctacgattgcctgatcagaaccttcagagttgtctccgggggtaggcgcatacttgccgtactcgaactgctggctggcctgatagatgtgctcaaggctgccatccaccagcggagtgacgccatcgcccatctttgccttggcaaggtacaggcctgcactcttcgggaagagccagtagccttgggccttgccgttctcctcgcgctcgaagtacgtcacgtcgaatgcggcgccttccagcacggtcggctcgccccagttttcggcctcgaggaatccgccatccttgatggactgctcgtcgccggtgtacgggatgaggatggtgttgttgcaccagccaccgttcgtggacgaggcacccttgtggaagccggccacaatccaccacttgccgttgatcttgtggaactcctgggcccaaatgaacgcgctccaaccgtagaacgagtcggggtactggtcttcgtggcccggagtgccgttctccggcttgatgatgatgtgttcctcagcatccttcagaccgttgatggtcttggcgcgcttgagaccgatggaacggtagccgtccttctggttgttggtcgaatcagtggacttcacctcataggtggaaccggtgaggtagtagtagccatcgtcttcgttgtagaagatgtccggatcggcgcgagcgtcgttgtacatggcctcggtggtctgctgaacagtgcccttgacctcatacgtgccggcctttgaggtgtccacggcggccagatcatcggcgttccagtcgacgttgaaggtcttcgtggagccgtcgttgtaggtcattgtggcctgcgttccggaaaccgctgcggtgacgtcctcggcggaagcgccgttctccacggttgcgccgcccagagccttgacgccggtgttttgcagatcgacatagttcttgtagaacgcatcgaattcagaggagctcacagcgaatgcgcgggtctggccttcgccggcccatgcgggcagaccttcggtcacgtcgcccacacccatcgcaaccgcgtcggccttgagcgtctcgccgaccgttgctttggcagtcaggtcggagagcgtggccatacggccttcgccgctcaggccatcggtccagaagactttgtagcccttggaggcggcatcatagacgatgcgcgggttggtgacgatggagttgtcggtcacggtgatggcgcgctcgttggtgaacgtggcaccgtcgcccttgccatcccacacgtaaatcgcaccggtggcgttgttctgcgaggaaaccacaccaagggtaccgtcctccgcacggaagaaagcgggtgagcccatctgcgcattcggcttggcagactgcgagccgtcccacttgaccgacagaatcgactgcgaacggttcagggtctcccatttgctgccatcggcggccttggcggccacgtacagcgagtcggcgcgacgatcgtcgttgtaggcgagcgggtcgtacttggcaccgttctggtcggagcgatcgacatccttgacgtaggaagcgatttcgccgccgttgttgaggatttcggattcggcggtgatggccttatccacgccgtcgatggtggcggtgagcttgaccttcacggccttctcgccggacttcggctgcgtgaccttgccgtctgcggctacgagcttcgcaccgtcgccggtcgcggaccaagtaaccgtcttgcccagcacagtgctcggcaggtcgccggtgatttgcgccgggatggcgagcgcggcggcgtagtcggtcttcgcgctttccacgccaagctcgtcgtcgctcagggccttgccccagatcttgaagttgtcgagcagaccggagaagtactcgccgttgctccagttggccttgccgatctgcagcacgccgccatcagcaccgaggatgtcggcgagcttctggccgttgttgttcacggctaccagcttggagtcgatgtacagcttggcggttgcgccggaaatcacgatatcgacgtgcttccagtcggcgttcgtcttggtgtaggagacgttgccggaggaatcgcgcttgccgtcgttgttgttgtagcgttcgacggtaataccggtggtcttgtcgagcacgccgacgtagtgttccttgccgtactcctgcttggtggcgttggaggcggcgaagaaggtccagccagtgttgccggaggcatcgggcttgacgtcgtagctgatggtcacgtcgttcttgcccttgagcagagcgtcgccgttcttggcggtgacgttgagccagaagttcttgctgagcttcgcggccttgccgtccttgccgtcggcgagcgtggcggtgccctgcgtggtgcccgtcgcattgccgccgtcgaaggtcttatcgccatcatcgaacgtgaagtcggcaagcagatccgggtcggtcggctcggtttcgccggtcacggtcaccttggcggtcacggtgatggcggtggagctgtatagcgtgcggttcttgttggcggtttcgttgtccacaaagccaccggtctgcttccagttgttgttcgcgttcgcaccggtgttgatgaggtcgtcctcgtcggtcttcgactcgccggcggcgttcgtccacttccaatggttctcgttggcaccgatggtgtcgaccgtgccggtgacggtgtattcgccgggcttggaggtgtcgacgttggaaacgtcccacgtcacgtcgcgcttggcagtgccgtaaccgttggcaagagtgacctgctgcgtcttcggcagcttggcagtgatgtccgtatcggcagcacccttatccaccgtcacatcctcggccttcaggtcggcgttgtcggaagccttggcgtcagccgcgcggatcgcgtcgtactgggccttggtgagcgagaccacgccaccgtgcttggtgttggcggtgaggaagtaatcgtcggccttcaggacgctccacggattctcggaatcgaggttgtcggcttcgagtaggttgtagccgtagcgggcaccggaggcgacagatccatagttgtcgacgaacatgtaccacttgttttcgccgttgaccttgaaaccgttggcaccttcctgcgcgctgccgagcgtgtgtccgatgttggtctggcgcaacacccagcccttggccgggtcggtcgcgtactggccctggtcgttggcacgccaccaatcggcacgatcggtgtattccatgaagatcacgccggaaccggtggtgcggtatgtgcgggaaccgttctgcagcatcgtggtgtcgatggtgttgccacggttgtacttgctgttaggcacgaagacgccgccaaacatgtaagtctcgttggtgaagtccttggtggccgcccacaacacatgcttgcaggcttcggcacggtcgccgccatcatacttggcctgtacagaccagtacagcacaaatgcaccgccctgctggttctcaggattgcccttgtcggaaccgttgagttcaccgtcgtcgttgagatcgtagaagtccggcacccacgtagcctcgggagcccacgccatgccgatgccggatacggtcttgccggtcacggaatcggtgagcgtctggctcttggtcggattggcggtgtacgtgtctgcggtggcggtctcaagctcgttcatgtcgctgaagtgaatgagatccttggacgaccacacatgcagcttggtgctgtaatcagtggtccatgcggcccactcggcgttgtccgcgccgaacacacgcaaatcggtggccagcacgtagtaggtcttcgactcggggttgtaggcgatgaacggatcgcgcacgccggtggtggattcgttgctcaccagaatcggctcgccgccgttgagcgtgtcccactgggtgacgtcatcaccgcgtgagatgtcgaggtagatcttctcggcgtagcccttgttgttttcgatgaagtggaccatcacgtagccgtaggcgtcatcggccttgacctcggtgacggtgaccttgagctcggcggtcttggcggcgtcagcttcggaagccgctgtaatggtggcggtgccggccttcacgccggtgaccttgccgttggcatccacagtagccacagcaggattgttggattcccacgtcactgtgggatcggcaccttcaggggtgacggttgcggacagggatgcggagttgccttccttgagactcagcttgccgtccttcacattggaaccggaaatctcgattgcagtaggcgatgcgatgccgagatcggctgcggaaagcgcggagccataaatcgtgagattgtcgagcaaaccggtgaagtattcaccgttgccccagttgcctttgccgatttgcagcacaccacctgagccgccaagaatactcttaagatcctcgccgttcacgttgctcgccacgaacttcttatcgacatagagcttcgcggtcttgccggagatgacgagatcgacatgcttccaagcatccttcgtaccggtgttcttgtcgatggtggcgatgtcggatgcgcggccgttgagatagcgttccacgcgggtcttgtcggtgcggtcgagcacaccgacgtaggtgggggcgctgccgttcaccgcaccggcggtcggcgcggcaaacacagtccactggccaccggtcgcagccgccttgctgtcgtagctgatcgtcacatcatcaagaccgttgagcagtgcactgccatcggacttggtcacgttcagccagaaaccgctgccgagctgggcggccttgccgttgtcgtcatcttttccgttgacgagatccaccgtgccttgcacggtggccttagcgttaccctgagcactggcgaatgcaccatcgtccgggtcgctattgaaatcgaagccggcaagcgggtctacagccgcagcagcctgagcatcgctcgtctgaacggattgctgcacctgaggtgtcgtatcgtcagccaacgcggtgaccggcgtaaccagtcccacgctcagcgttgataccgcagccaagcaggccgccaatcgagtaactctcctcaccgagtttccttcctcgcatccttgctagattgttatcaaattgttatcgctatggcgcttggccgctcctttatcggccacttttgcgtctccttgtacgaatcagcacttcctcgtttgccgattcgcattacatttgactgcacttgcccaccaatccgcccctacgaacaacgccgttttccggggacaacaccgatgcgctatagcacgcccaaatgcaagcacttataagtttagtgttagcgttcactggtacggtacacaggctctacagcacatacatttagcatgaccacaccaatacaataaaaaatgacgcatgtgctgttatacattaaaacgcacagaaaatcacatatatactgtgcgattttctgtgcgttgcagtgagcagctactcagttatgcgcggcgcttgcgccagatggacaacgcaatgccggcagcggcgagcagcaccatggcaccgctcacgccatatacggcggcaccggtggccggcaacttgccgtcagacttggtgtcatcggtcttgtcgcctgcgttatcgcccttgttgtcaccatcgccggtatccggcttggtgggcgtttccgccttctgcaatgctgcgatggcggcgctcagatcagcggcggccttgtcaaccacagcctggtcggaggaagcgagcgcagccttggcgacctgcagtgccttggcgagcgcagcccaggaatcagccgtgtaatcggattccttgagcgcttcggcagcggcgatctgcttgttgagctcagccaaatcgaccttgccctgttcaatgccgtcaaccgtagtatcggatggattgaccaaaccatcggtgtagccgtcgtaagcaaccgcaacagtgccagagacgctggccgggagggtcacagtggccttgccttcggcgtcgagcttcacggtcttggaccagtcgccagcagagaacttcaccgaaccggcgagcgtgcccttatcggcggcggtcaccgtggcggtgagctcgcgggtgccggcgttgtacacggccttggtggtggagtcaacagcctcgatgtgcgtcgggttggcagcggtccaggacttcgtcaccttgagcacagactcaggcacgttcacgaacgcaccgtgacgcaccttgtccggcagaccgccgttagcaccctgagtgatgtagccctgagcgcccggctcggctttgaccggcttcttttcgttgttgaagtccgggtaacgcttggtcatcgggttgtcccacgtggtcttggaaagctcggcacccgtggtcataaatgcacggtaggcgaagttgtcggacagcagaatgtagccgtcgtcgtccttcgtgttgagttcgtcatccttgttgagcttgatggtctctggtccttcgaacggcagcaacgcctgctcgagcagctgccaaccggtgttcgggtcctgacccggagatgcctcggtggtcggtgcagtcagcaccttggaacgctcaaggaagatgctcttaccagtggtgatgtaatcgccagcggcaccgccctgctcattcttggtgaatcggtagtagtagccaccgatcttacgcacggtggaatcaatgcgcgagtagccggtgtcctgccacatctgcggctcggtgaagttcacgaagtcgcgggtgatggcgtaacgcacctgagcataggagctattgccggttttgtcgttcttgaccggagtggtacgggtgtcatcagtgaacatgcgggaagagaagaacaccacgtaagcgttcaggtcatcatcccagtaagcttccggcgcccaggtcataccggcgttcggcgtgttgatggtgatgccgccgttgccgtcgccgttggtacgggtccagttcatcatatcggtggactcgtagacctcaactttccgagaaccgttaacctggttctggctccagcccattgacgagaccttgagatcagtggcaatcaggtagtacttgtcgccttcgtgggaacgcagcacgaacatgtcacgcaagccacccgtgtctgcatcattggtaagtaccgcctggccattgttgcgagtcttaaacgtgaagaaatcgttcttctcagtggaagccacccaggccttttctccaccgttgctgtcgctctcaaaagtgacggccgcatagccggtgtcaggcgcgatgcgggtcttctccttgacagtgacctcgatggtcttggtgaccttctcaccgccgttgtaggaagcggtggcggtcagcgtaaccggcttggaatcaccgtcgccgtaggccggacgattgatgatgccagcaccacgatacgggtcatcggcaccagtggtcttgttttcgtacttctcgttagtggacgtaatgagcttctcgtccgaggacttccacgtaatcgccgagccgttcttggtgcccttggcgactagcggcagattctcggccgccggaactttcagcgcagcaatcgcggcatcgaggtcggctgcggcggcgttctgggcgttcatcggctcaacggtgacgggcagttcggccttcacaccacccagctcagtggtggcggtgatggtggcagtaccagccttgacgccggttacagtaccgtctgcggcgaccttggccacggactcatcggaggaggaccaggtgacgttcttgctcacggcgtcgtccggagtgacggtggcggtgagcttggtggagtccttctcaatcagggtgagcttgttgttcaccacaccggtaccggaaatcgcaacggcggtcggcatggtcaggtcagcgcccctgtagaccttgatatcatccattgcaccattccagtactcatcgacggagtagaacgacttgccgatgtaggcggtggtcgcaccgagatcgctcatcttgatgccggtgttggccttgaaaatgatcagggcattgttgcggaacacggcaaggttggtgccgtccacgacaatcttgtaatcggcccagctgttgtcgttgccggaaacggtgaccttggatccctgttcgttaccccagttgttgttggagataacgcccttgatggcggtcttgctgttgtagaacatcaggtacttgttggcgttggcctgatcggtggtgttggcgtcgttcgagccgtccttgccgacgatgaacgagaagaacttgccgctgtcgtcgtgacgagtcttggacgcgaactccagagtgaaggagtcgcccgcatccttgaacagctggtcatcgatctgggcgtactggccatcgccgcgcagtgagagcgcctcgttgttgctgcggtcaccgtactgttcgatcttggcgccgtccttcagcgtcaggttgtacttgccggtcgaatcggcaatcgcgctgttcgtggtgccgtttttgcccgtgaagtcccagctggcgagcagcgtcggttcagcagccttagtagtctgcactgtcgcggtatcggttgtccatggttgggaatcttccgattccatggcatacgtcgtcggaactactgccaccatcgttgatattgcaatcaacgatgctgccatcttcttccaatgcttcaccgcatctctccttgtcctttgcctcgacccacttgtcgagtgtctcgttcgcctctacgtgaacgcaaacattatttgcgatgataccattacggcactgagactcagtgtgccagattccttatgtatataagcacttacggggggcaaccgcccagcccgaacactccccgtatgccaaaagcccccttccaagccaatcactaatacccctcaatcggcaccccgctccgccagccgccccaaactgttattaatttgttatctttaccgcgcttgcgtggacagagagcgctcagacctcgaagatcgccgcatattgcgtgagaacccgcctagtcaatgagatatggcttgaagacacgctcggcgacggggatatggagcatcagcatggtgccgtaaccaaggatcaccagcaggaacagtccaccgggcatgtggaaccagctggccaccagcagtgccacgaacacggcatccacgatgaccagggccacggtcatcgcgatgtgggagatgccgaagatgaaggcgttcttcaaggtgccggccacggtgttctcgaagcgtgcctgaagcgcgaacacccattcgaaaccgataagccagaggatggtcagcgcgaatttgatgatgagcagcggcgtgatctgcaggacgatccatgaccagaccagtgcaatcagcgccaccaagaacggcagccacagcagtgtggctttgatgaagttggttttgaatgacttgaagtagttggaggttacgcctttgccctcgccctcgatggagcggcggcaagcatcatggccggcagtcagggccgcaccgatggtgatgatcggaatcgaagtgaccagcatcagaatgttgatccatacgccgtcaacaagattgctccacgcgcgcatgaatttcgagtccggtgccagccagttcatcaactactccttgtacagcttttggctcccctcagggaggggagccaaattgtcgggctcaacccttgaccgcgcccgccatgacaccagagactatatacttctggcataccaagtagaagacgatgatggggatgatggccagcaccaggcaggccatcatggcgcccatatccacggaaccgtagccgcccttgaggtattgcacggcgaccgagacggtcttgtacttgccgaggtcgagcgtcaggtacggcagcaggtagtcgttccagatccacatggcttcgaggatggccaccgagacgatcgacggcttcataatcggcaccacgatctggaagaagatgcgcggcactgacgcgccgtcgatcatggcggactcctcaagctcctgcgggatgcccttgatcacgccagtgaagatgaacacggccagaccggcaccgaaaccgaggtacacgatgcacaggccccacggggtattgagcttcagcatgtcggcgatcttggagagggtgaacatcaccatctggaacggcacgatcatattgaacaggaacagggtgtagagcagcttcgcggcccagttgttcacgcgcacgatccaccatgcgcacatcgaggtgcacaccagaatcagcgccaccgagccgacggtgataagcaacgtccagccgaaggaggcgaagaactgcgtggtctcgatgccgcgcacatagttctcaagtcccacgaacgccttgccggcaggcagggagaacgcgttcttggagatgtacgccttctgcttgaaggagttgatcagcaccaggacgatcgggaaaatccagaacagggagacaacggcaaacagcacggtccataatgcgccatgcttcacaggcttgttctcgttcatcaggctgccacctccttgctcgtggtgagcttgttctgaatcagggcgatgaccgcgaccaggatgaagaacagcacggccttcgcctggccgacgccttcccagcccatacggccgtagaaggtgcgggtgatgttcagcgccagaccttcagacatgttgctcggcgcaccgttggtcaatgcgaggttctgatcgtagagcttgaaaccgttggtcacggtcaggaaggagcacacggtgatggacggcatcatcagcgggatgatgatgcggaacatggtctgccgtccgttggcgccgtccacggccgcggcctccagcacatcggtgggcagggcttgcaggccggcgatgtagatgatcatcatgtagccgatctgctgccagcacaccaggatgaccaagccccagaacccgtaggacgccttataggtcagggcgcggccccagtgggctagtacgccgttcaggagcagcagccagatgtagcccaggatgatgccgccgataaggttcggcatgaagaataccgagcggaacagcgtggagcccttgatcgccttggtcagcatgtaggcgatggcgaaggcgatcacgttgatcacgatggtggtcacgatggtgaacgcggtggagaagccgagcgcgtgcaggaattccttgtctttcaacgctttgccatagttcttaagccccacccattcaccgtcggtaacggtggtgaattcgcagaagcttaagtagacgcccatgatgaagggcaccaggaacccgatgatgaatgcggcgaatgtggggagcgcgaacagcgcccaccatctgcgtatcgccttgccagccatgctgatcatgacttttcctcctccttgagtccgctgcgttgtgacactgcatcgtgcgccggctgcggagttcaactcaatgcgagcttgccgatcgagaaccgcatgcacggcctgttctcgttcaagcctatgttcatagtaaacgtcgaatcattatatgtcaaacgttgtcattttaggcgtttcaagttcgagcacactccggctccagcaatcttctttcacctaagataatggctatataaagccaatctaacgccgacatagacactttgcaaacgtttgtaatacaatcgttgtcatcgccgcagatcaatcaatcagcatgtacactggagtcagttgtgcatgtgtattgcgattttccattcaacgcaagggggctgcaatggctacgagcattcaggatgtcgcccgcgaggccggcgtctccatctccaccgtctcacgttccttcaccaggccggatctggtgtcggccaagacccgcgagcgcgtgctcgccatcgccgacaaactcaatttctcactctcccgctcggctgcggccctgaaatccggccgctccctgcgcatcgcagtactgatgagcggccatatccgcctgtggttcaccgcctcggtcatcgaggggctcaacgaggtgctgcacacgcagggctacgatatttcggtattccagatttccagcatcgaggagcgcaaggaattcttcgagatgttgccggtacgccgtaacgccgatgccgtgattgtggcgtctttcgatatcgacaacaacgaaatcgcgcaactggcttcggtcggcgtgccgatcgtcggcatcaattcagtcgaacccgaagcccgcggctttaccgccgccgtcaatatcgacgatgtgcagggctccacgctggccgcccgccatcttatcaatctcggacatcgccgcatcacctacatcagcaccaatcgcgaggtgtcgctgagcttctccgtgcaaagccgattcgactcattcaccgcctgctgccgcagggaaggcatcgagccgcaggttatcgtctgcaaggtcgatgacgatggacgttatgaaatcagcgacgtggtcaaccaactcataagccaagacgagatgcccaccgccatcgcatgccaagaggatggcattgctttgccgcttatgttccagctggagcgcaatggattctccgtgcccggcgacgtctcgttgatcggctacgacgatagtttctacaccggcgatatcggcctgaccaccatccgccaggatccggtggaaatggcccgcgtggcagcccgcatgacgctcgatctcattgacgaaaagccgattgagcaaccctacatcgtgttcccggcccagctgaaggtccgctcctccacctcccgcgttaagtaggctcacacaacaaagcccaccatagaaaaagtgtgaggcaaccgcacaataacgctcaatcgcacattgtggagaatggcgaaaaatcgccgattcatggccccacagcgtgcgattgagcgggtgcgtgcctcacacttttctgcggcggacgattttgtgcgagactcagcaatacaaagcggcgcccctggagaaggaaaggcaggggcgccgcggattgttgcttatcggctatgggactctatgagactcagtgcgaagcctcgtattcggaagcccaaccgtccacgaaggcggtcttgacggcatcccacttgccggtgccctgcgcgtactcgagcagtgcctggccgaccttgttcttccactcttcggacggcatcatggtgaagttccaagaaacctgggtcgtgccggacttctggtcttccacggcggcttcggtcagcgggttgtcaaacttgacgtcatcgaaggtcttgaacggggtggtgaagcccatgtcctgagagatggccttcttgccggtgtcggaggtgatcacccaggagaggaagtcctcggtggccttcttgtcggcgtcggaggccttgtcgttgatgcaccagtagttctcggaaccagtggccaagccctgcttctcttcacccttgacaccggtgtagattggcatcatgcccacggattcggccttcatgccggccttctgcaggtcggtccaagcccaggtgccgttctggtagaaggcggcctcgccgagcgcgaactcggagttcgcatcatcgccggtcttggcgctcagctgggtggggtcggtggtggagtcggtgatgtacaggtcgaagatcttcttgtagttcggcagataagtgcccttgatggtggccggctgctcggtgacgttgtcgtccttgaactcatagtagagcggcaggttggccagatgggtcttgaatcgccagtcggagctggagtcgaagccggcggaggtgaacgcgcccttgatgccgagctcgtccttgcgggcctgcatgtcgtcggccacggccttcagggtgtcgaagttgtcgatttcgtccatggacgtggctttggcaccatccagcgcgaagtacttgttgaggatgtccttgttgtagatcaggccgtaggtttccatcacgtacggcacaccgaccaccttgtcgccgtctttcagggccacgtcctggttggtgagttccttatacacatccgtgttggacatgtcggcggtgtacttcttccagttctggtagccgaccgggccgttcacctggaacaaggtcggggcttcggttttggcgatttcggacttcagggtctgctcgtaggtgccggaggccgcggtctggaccttgacatcaacgcccttctccttggtgtactccttggccagagcggcccactgatcagccgcttccggcttgaagttcaggtagtagaccttgcccttggcgtcatcgccggaggtcgagcttccgcaggccgccaaagtgccgagggacatcgcagcgatagccgccatcgcgactgctgacttgactgtacgattcatcatcgaacctttctctttcatcgtcgacccggccgtccccggtcaggacaggtacgctaacacgcacctttatgactatcgacatgcactattgtgcaacggtttgcttctttttgcaaacgatagcaatatcggcgcgtcataaatcatcattttcaggccattgtcaacaaatatcccattaattcggtcatttttgcctcattatcgcaatgcaagcgttcgcaattatgagagcgctaacatatctttcatggcaatcgattgccacttatacccatcaaaaaaaacaacacggcgacgctatcgtttgcaaatcatttatcgacataccgcaattcccaccacaaacaataaaggcccgcccgcagcagcgggcaggccagcgtaatcacagcgcaaccggggctaggcgttccaccgttcgatgacgttatctcccttatagacgctaagcaccgagtagtgcgccgtatccaaacgcagcaaccgcgcgaaatgcgggtccacgcccagccattgcgaggtgaggatgcgcaggatgtgcgcatgagccaccaacagcacattatggccgtctttcagcagcggcgtaatctcatcgatggcgctcttggcgcgtaccgctgcttcttccagcgtctcgccaggcccggcatggaccggcacctgctcgcccgaaggcaaggtctcgacccagtcgccctccagcgtgggcgtcagcgagcacggcccgtcacgccacacatcccattcaaaaccgctggcctcactcacctgctggcgcgtacgcccctcggctcggccgtaatcccattcagcgatgccgtccaacacaccgtggtccgcaaaaccagccaattcagcggtttggcacgcccgcttcagcggactggaaaacacacagctctggctgaatccttcggggaaggcctcgcgcaggcgccttccggcatccgctgcctgctgctcgccgaccgcggtcaacgggatgtccgtgcgcccggtatgctgcccggattcgctccacacggtctggccgtggcgcagcaacaccaaaaatccattgccgccacgagagttctcgacggcaacggtgccgttcacgttctgttcgctcatgcctccactctagtctgcgctcgttcatgactccaccattaacgcccatcttttgcgctgagatgattgagatgctattagactgagagtcatgagcgacgaaacgaacaccgacttcccctccagcgccgaccgcgcggtcgacagcctgcaccgcatcgacgagaaggtcaacaggctgcgcgaggaccggctcaacgaccctgattctctgggcgacaagctcatcaagtcggcagtcccagcgctggcaggcttggttgccggcaaagcattccagatgatatgggacaagggcacaagcaaacgcaatctgcgcaagggactggcggcagacgcgccgcaaagtctggcaatgagtctggcattcgccgccgtttcggccgcactcggcgcagtggtttcgcagctgtcggatcggggctccaaggcgttcgtcgaccaccgccatcgcaagcccagccgctaatcccccggttggatgatggtttctgttggctgactgatgactcatcgctggaatttcgtcaaggaaccatcagtcaatcgacaggaaccatcagtccagcacagttccgccacacaatatcggcatttcactgtgaggtaatccaccgtgacgtccggcgtctgccgtgcgacaataaagccatggttaccaacgcaacaatcgaggctcttctgggccgccgctccatccgtaagttcaaggacgaggccatcgacgacgatacccgcgccacgctcgaaaccgtcgcccaacatgccgcgtccagccagttccttaacgactggtccgccatccgtatcaccgacccggccaccaaagccaagctcgccgaattcggccatcagccgtatatcgccaccgcgccgttgctgtacgtgttcgtcatcgacgagcaccgcaacgcacgcatcgccgaacgcaagggtatcgatcccgcttccgacgaattccatctcaagtacagctatcgcttcacccaagctcagaacgacgcagtgctggccctgcacgccatggagaccgccgcctattcgctgggactgggctgcgtgattctcggctctctgctcaacaacatccccggccttatcgacgtgctgaatctgccggaatacacgtatccggtgctgggtctggccatcggcaagcccgatcagaacccgaccgtcaagccgcgcatgccgcgcacgatgcagttcttcgagaacacctacccggctgacgccgatggcgtactcgaccagctgcccgccttcgacgaggaagttcaccggtactacgatctgcgccaagccgaccgtccggtggacgctttcagcgatcaggtcgccacgatcagtcggcaggatgtcagccatcagacactgctcgacaaggccgccgctcagggcttccgtctggatcagtgagaccagaaccaacgagatagcctcggataggctcgtcactgagtcgtctcggtctcagcactgcgacgactcagttccaacacctcaacatttcatcaccggataccggcaaaattgcacaaccatcccgccggtgtcgcaccatcaacaaacgttcacatatcagtcccattatgcggacaaccaacggccagttttgcaagaaaacccgccaaaccagcagtattcgcaccagtggtgggaatagactgcatgtggccgcaatgattacgaaccggaaaagagggactggatgcggacggtttggcaagtctttctacgcgattgcagacgtatcttacgcaatcccgttgccgttgtggtgacgctcggcgtagcaatgctgccctcgctgtacgcatggttcaacattctcgccaactgggatccctattcagccaccggcaatctgcaagtggccgtagccaatgaagaccaaggcaccaccaacgatctggtcggccatctcgatgcgggccggcaggtcgtcaagaaactcaagcagaacgacgaactcggctggcgcttcgtagacaatgaggaacaggccgtccacggcgtggagaccggcggatactatgcagccatcgtgctgcccaaggatttcagcaccagcctggtcgaatcggtgaccggaacctccaaacagccaaaaatcaagtattacgtcaacgagaagaagaacgcgatcgcgccgaaaatcaccgacaccggtgccaccaccatcgacgagcagatcaactccgccttcgtcaccacggtagccaccaccgttgcctcggccgtttccgaagcgggaggcgatctcgaccaagccaccggcaaagtccagcacgatacgatcaatgatctcaatacggtgatgtccacgctgaacaccgttcaggattcactcaccgacttacaggacacgctggcccaatcagacacgattctcgccgacgccaaacagaccaccgcctcactcaagcagaccgtcgcggccgcgcagaaggcctcccgccagtccggcacactgttgacggaaacacaggccgggtcacaagccttctccaccacactggtcggcgcgctcgacaccagttcagcacaactctccggactggccgttcacgtcaacaacgccgccggcagcatcaccggctccttcaacagcgcgcagaactccgtcgacaccatcaccaacacactttcggccccactgaatgccacccaaacgtcaatcagcgatctgaaagacgcgctgaccaaagccggcatcggcaaagacaccaccgacccagtcggccagaacatctggaaacaaatcgatgcgctcgactcattgatcagcaaacagcagacacagctcaacaccttccataccgacaccacacagttcatcaactccggtaaagacgccaccacgaatctttccggagccatgaccaacaccaccaccggcggcatcgcggcgctgaataccgcgcgcggctcgctgaccggcaccgtaatgccgtcgctcacctcatcattgaacagtttcgccgccctgaatggcacactggatggcacgttgacttcgttatccggcaccttggatcaggccgacggactgttcgaccagcttgtcgataccctgaaccaaacaaaaaccaccatcagcagcacgcaggattcgctgcgccaggtggccagcgatgtcgccaccgtacgcaccgatatcgccacgctcgatagttccgccgcttaccagaaaatccgggatacgctgcatctggatgacaagggattcggcgacttcatgggcaatcccgtcaccctgaccacgaaagtcgtgtatgccaccgacaattacgggtccgcagtcaccccgttctacacgaatctggcactgtgggtaggcggtttcgtgctaatcgccatctacaagcttgaggtcgaccgcgagggcattcgccgtatcaccgctacgcaagcatatcttggccgctggctgctgctggtcaccatcggattcctgcaagccatcatcgccaccatcggcgatctggtgcttggcatccaatgcgagcatccgctgctgttcatcttggccgggatcttctgttcgttcgtatacatcaacattatttacgcactggccgtggcgttccgccatatcggcaaagccatcgccgtaattctggtcattgtgcagatacccggcgcctccggcctgtatccgattgaaatgatgccgaacttcttccgcgaactgcacccgtggctgccctttacctacggcatcaacgcgatgcgcggcccgattgccggcctgtacgcgaaccattactggctcgacatgctgcacctgttctggtatctgccggcggcactcttcgtgggacttgtcatacgccggtatgcgatgaacctgaacgcgctgttcgaccgtcgtttgggagataccgacctgatgatcaccgagcacaacagcatggtgaacgaacaggtgagcttgaactccgtattccgcacggtgtccgacagcaaggaactgcgcgatatcatcgcccatcgcgcgcaccggttcttcgcacggtatccaaagatgatcgttgccggtctggcattgctgaccgtactcccgttcgtattcctggtgctgctgttcgtcacccaagagaaaatcgccatgctgacctcttggattctgtcgattattcttatcgacgcctatctcattgtggttgaatacgcacgcgaagcctacgccatgcagcttggcgtcagcgccatgagtgccgacgagttccgcaatgtgatgctcaacggatatgtgtggcggcgtttccacggccacggacgtcacgaagcggcgatgggcagcaatccggatatcggcgaaaccactgaacgactcacaccgttcagtgatcaggccgccgagccgactgcgcacaccgcacagttcgagcagtccggtcagtctgggcagtctgggcaaggaggcgcacgatgaagcttatctggaaaatattcgtacgtgacgtgcgccaagccacccgcaatgtgatcgccgtaatcgtggctatgggattggtgattgtgccggcactgtacgcctggtacaacatcgccgccagctgggacccgtacggcaacaccaaggccttgaaggtcgccgtggcaaacgtggataagggctataagtccgatctgatgccgatcaccatcaacgtcggcgaaaccgtgaccaatacgctcagggccaatcatgaccttgactggcagtttgtggatcgtgctaaggccatcgatggcgtgaactcaggcgaatactatgccgcgctgattattccaaagagcttcagctccgatatgatgacgctgttttcaccgaagatcaagcacgccaagctcgaatactatctcaatgagaaaatcaatccgatcgctccgcatatcaccgaccagggtgctaccaccgtggccacgaccatcgaccagacatttgtgaagaccttggcgagcgtggcgctggatttggtttccaacgtggccgattacgcgcaaagcccgcaaatggagcagtacgtcaacaacgcctccagtcatattgccaccatgtcgtctcgtttgaccggcactgcgtcgcagatggattcctatgccaatctgctcggggccgccaacagcatcattgattccaccgataagctgctgggatcaacaggctcagctgcggccacaaccaaaaaggcgttgaaacagacccgcaacggcgtctccagcctcgacaaggcattgtccggagccaccgatggcgtcggtacggcattgcagcaggccggttcatcctacgacaccattgccaagcaaatcgatgccgcttttgccgatgtgggctcacaatcctcacagatatcaaacaagctaaccgatatgcaatccaaagtggaggctcaggccgacagctttggaaagtatgccgccgctttacgagatctcgccaaacaagcggcttcactgcccgtgggcggagataccgttgccgctcaactgaacgcggctgcagaccaagccacaaaggcgcagcagagcatgcagcaagccgccaccgcgttgggcgatgcggccacgcacatagcaaacggtactgccgatgccgatacagcgcgtcgagatctgaaatcacaaatcgctgccgccaaacaatcgattactcaggcttcagacacgtacaagagcacgctgaaaccgcaactgaacaatctgacctcgtccatggacgaagtgaccacgcaggcaagttccgtaatcgacgggcttgcatcgaccgtaagcagcgtgtcaggtctttctggcggcgtttcagacagcctgacggacatccagtcggccttgactgacgcagctagcgctttgacccgttcggcgaagaaactcgacaacttgtcttcccaactcgcctctatcaccaatggcggcaccatcgacctgtctgtgatttcctctgcgaagcccgatgccattgcttccatgctggcggcacccgtagcggtcgaccgcatcgcgctctatcccgttgccaactatggttccgcgatggctccgttctacacgattttgtctatttgggtcggtgcgatcattctggtcgccatgttgaaagtatcgatttccgaccatgagaaggctcgtatcttagggttgggcaatgatctgccgctcggttcggaagtgggtcttcgcgaggccatgattgccgggcggattgccggaccggccgccgcgttggatgtgctgaagaagccgcgtgccgaggctcccggcaatgcgcggcagttcggtttacgcttgcaccacgaatatttcggccgatacatgattttcggtttccttgctttgctgcaaggtacgctggtgtgcctgggcgatatgttctatctcggcgtgcagtgtgagcatccgattcagttcttgatggtcgggtggttgtctgcactggtgttctcgaatattgtgtatacgctgaccctgtcgttcggtgatatcggcaaagccattgccgtagtactgctggttatgcaggtagccggttccggcggcacattccccattgaaacactgccgacgttcttccaggtcgtttctagatggctactgttcccctatgcggtggatgcgatgcattcggccatggcaggctcattcggcatggaatactgggtttccatgggcaaactggcactgttccttgtcccctcattgctgttgggacttatgttgcgcaagccggtaattcgcttcaacgattgggttatccgcaaccttgaaaacaccaaggtgatgtaagtgttggacgaagtgtgtccgagcgccctgaacgcttagcagcctacgacctgacgtgtttggaccgtaacctgtctcagacacggcgttggcgaggtctgtggagcttctgacgctaacgtctacgtggcttgtagccctttttacgactgtgtggcttgagttgctggttcagcggtacatgccggtaactggattgcggatcgcgatgcgtgagatgccagcatccgcaaaattcgcaacggtacacccatagctcaactccgcgctcgattaggctttgatcagcggcacgctgaacctgcgccttatcgtgatacatgattttattcgacgtagcgcaacgtttaggggtgaagtaatgcatagcagaagccagtgtagagcgaccccataaccaagccagtttggcggattctagtggtggttgcaacacctgaggtttgagcggccttccatggtcacgttgtcggttgttgaggttatcacgcggcgtcgagcagttcgatgatcttctcgcttggtttcatgaacccgagggttttgcgtggccggtcgttgagttcctcggcgaccgcgtcgaggtagtcctccgggtagacggataggtcggtgcccttggggaagtactggcgcaggagcccgttggtgttctcgttggtgccgcgctgccacggggagtgcgggtcgcagaagtagacggccatgtccagcgaggcgccgatccgtttgtgcagggcgagttccgctccctggtcccaggtcaggctgttgcgcaggagtttgggcaggtgctgcatcttgtcgatgatggcctgctggacgtgttcggcgtcgtgcccgtcgggcaggtgcagcaggatcgtgaacctggtggtgcgctcgacgagcgtgccgatggcgcttttgttgcggctgccggtgatgagatcgccctcccagtggcccgggaccgcccggtcctcgatctccgggggtcgctccgagatcatggccatgggttcgcggaaacggggtttgcggccttggccgccttggggtctgcgggcggttcgcccctgcctcatggcgcgtttcagctcctgcttgagttcgcccctggcctgcaggtagatggcctggtagatcgtctcgacgctcgcgtgcatatccccattatccgggaagtccagcctcagccggttggctatctgctccgggctccaatgcctgcgcaacccggcggcgatctcgtcccacagtcgcgtgccctcggccgccttgcgcggtttggggcgtttgagccggtccgcggccttctgctgggcgcggtaaggctcgtaaccgccggactcgggattcctgttgcgctcgacctcgcggctgaccgtgccggggtcgcggcccagcaggcgggcgatggcgcggatcgaatcgcccagacgcagacggtccgcgatctggatgcgctcctcctggctcaggtagcgcggatggagggtcttgggtttgtccatggtggaacgataccagtccaccaggggtttctcgttccttcccgtggcgcgcgtcctgccgttgcgccacgccttgccggtgcgtttcgagacgccgaccgcgtgcgcggcctgggtgaagttcatgccttcctcgtccagcaggcgcacgtactcggcgcgtctcgcctcgcacatcagcttcctcgtcggatattcgacgccgttgaacgcccaacggtgttccccgccacggtcttcgtttcggtggcttctggtcacctgaccctccttgcggtaggtcaggtgttgcaacgatcactagaacccgccgtttctggctcccctcaggggggggggagccgtccgcacagcagaccggggggaggaggcccgggcgtcgggattccacggtcacggacgtgctgttttccggatttcctgcggaaatgggaacgcgccgcgccgtctctcttcggccccgacggcggggccggccgggaatggtcccggacgtgggtctcatgagtgcgagaagccccgggtgtttttgtgggggtgtgtgggtttgggtcgtgagtgtttcgggtatgcgaaagccccttggggcgtgtgctccgaggggcttcctgtacgtgtggtgcggcggcgtgctactctcccacaccctgtcgggtgcagtaccatcgccgtgccaggccttagcttccgggttcggaatgggaccgggcgtctcacctgggccatggccgccgcaaatcttctcttgtacggtcagacgctggggtctgccggcctgtggcggcctgggaaccggacagcggacgcggatatgtcgatgtttcgtcttgtggccagacaatgctcattgccgtctggtgccgtttgcaggaggaagatgcggtccaaccgccaggggttggaatgttagtgttgcctttcgtccgttagtaccggtcggctccacccctcgcggggcttccacgtccggcctatcgaccacgtgttctgcatggggactacaggaactcgaaggttccacggaatgcttatcttggagcaggcttcccgcttagatgctttcagcggttatcccttccgaacgtagccaaccggccgtgccactggcgtgacaaccggcataccagaggttcgtccacccaggtcctctcgtactatgggcaggcctcctcagcattccaacgagcgcagaggatagagaccaaactgtctcacgacgttctgaacccagctcgcgtgccgctttaatcggcgaacagccgaacccttgggacctgctccagccccaggatgcgacgagccgacatcgaggtgccaaaccatcccgtcgatatggactcttgggaatgatcagcctgttatccccggggtaccttttatccgttgagcgatgccgcgtccgtacaccggcaccggatcactagtcccgactttcgtccctgctcggaccgtcgtcctcgcagtcaagcccgcttgtgcacttgcactcgccacccgattgccaaccgggctgagcggacctttgggcgcctccgttactctttgggaggcaaccgccccagttaaactacccgccaggcactgtccctgaacaggatgactgttcgaggttagacatccaatgcgaacagagcggtatttcaccttgcggctccgcgcgatctggcgaccgcgcctctcggcctcccgcctatgctacacaatccacaccgaatgccaataccaaggtatagtaaaggtcccggggtcttttcgtccttctgcgcttaacgagcatctttactcgtactgcaatttcgccgagctcctggtcgagacagtggggaagtcgttacgccattcgtgcaggtcggaacttacccgacaaggaatttcgctaccttaggatggttatagttaccaccgccgtttaccggggcttgaattcaccgcttcacccgaaggctgacggatcctcttaaccttccggcaccgggcaggcgtcagtgcatatacagcggcttgcgccttcgcatgcacctgtgtttttggtaaacagtcgctaccccctggtctgtgccacccccaaaagctcccacagcaagcgtgttcaccatcgggggtctcccttaaaccgaaggaacgggagtgatttgccgagttccttgaccaggattcgctcgatcgctttggtattctctacctgaccaccagtgtcggtttggggtacgggcggcttcgagcctgacgccgaagcttttctcggcagccgggatcaccggatatcgggccataaggcccccatcatcgcacctcggacccatgcgggacggatttgcctgtcccacgccctgcgtgcttgaccacggaagaccacctccgcggccggctacccttctgcgtcactcctgcgctgacctactacaaggatcggtcccaacaggccagggcatcccgcccccgaaggagcagtaagcccggacccggaggttagtactccaagcctcggttttggcggctgaaagccggtacgggaatatcgacccgttcatccattcgactacgcctgtcggcctcgccttaggacccgactcacccagggacgatgaacgtggccctggaacccttggtcatccagcggacgggatcttcacccgtctctcgctactcatgtctgcattctcactcccatgaagtccacggcgcgttcacacggccgcttcgcccctcatgggacgctctcctacccagtacaaaatactgccgcgtcttcggtggtgtgcttgagccccgctacattgtcggcgcggaaccactagaccagtgagctgttacgcactctttcaagggtggctgcttctgagccaacctcctggctgtctatgcgactccacatcctttcccacttagcacacgcttcgggaccttagacgacggtctgggctgtttccctttcgacgacgaagcttatcccccgccgactcactgccgggatacgcgtcaccggtattcggagtttggttgctgttggtacccgatacgggcccgcaagcatccagtagctctacccccgggacgtaatgacccgacgctgcacccaaatgcatttcggagagaaccagctatcacggaatttgattggcctttcacccctagccccaagtcatccccccggttttcaacccaggtgggttcggtcctccacgcggtcttacccgcgcttcaacctgctcagggctagatcatcccgcttcgggtccaggacacgcgactcaaacgccttttaagactcgccttcgctacgcataccccacacgggttatgctcgccacatgccactgactcgcagactcatttttcgataggcacgccgtcaccccacaaaagggctccgacggattgtaggcgcacggtttcagagactgtttcactcccctcccggggtacttttcacctttccctcacggtactcgttcgctatcggtcagacaggaatattcaggcttacccaacggtctgggcggattcgcacggggttccacgggacccgtgctacttgggagacgcgatcggcagaccatgcgcgttcaggtacggggccctcaccctctgcggcccggtattcaacccggttcccctgacacatggttttctgcaactgccggccggcccgtcggagccggcgcacgcgatcccgcaacaccccgcgcgcaacccccgacgggtatcacacgcgcaaggtttggccatcatccgctttcgctcgccactactcacggaatatcctttcctgcaggtactgagatgtttcacttccctgcgtaccccccggccgaagccggtaccgacccatgacggtcggtgggttcccccattcggaaatcctcggatcaaagccctgttggcggctccccgaggcatatcgcagcctcaaacgtccttcatcggtcctgtctgccaaggcatccaccatacgcccttgcaagcaacacacaccacgaaagtgcatggccgcaagattcctctagcaaattcccagacgacaaatcatcacactaaaaatgatcacaaaacgatcgaaacgaacaatagagttcgattcgaaatcaacagcaaaacaaagattcaaaaactcttgttttgctcgcgtccactatccagttctcaagccaccacgcaccgccacgccatcgcgccggcacacggccggcccccaggcacgacgggcatcgaatcgcgccaggcaaaaagcctggggtggcgatccgggagcccaaaagcgcatccataccaccccgcacccaccgcacgaccggcagggcaaagccaacgacgtcttccacaccagcaaccccgccgccatcgcaccatgcgacgcgcggggcgcacaccgtcggacgaacatccgactgaattctccgtagaaaggaggtgatccagccgcaccttccggtacggctaccttgttacgacttagtcccaatcacgagcctcaccttagacggctccatcccacaaggggttaggccaccggcttcgggtgctgcccactttcatgacttgacgggcggtgtgtacaaggcccgggaacgcattcaccgcgacgttgctgattcgcgattactagcgactccgccttcacgcagtcgagttgcagactgcgatccgaactgagaccggttttcagggatccgctccgcgtcgccgcgtcgcatcccgttgtaccggccattgtagcatgcgtgaagccctggacgtaaggggcatgatgatctgacgtcatccccaccttcctccgagttaaccccggcggtcccccgtgagttcccggcataatccgctggcaacacggggcgagggttgcgctcgttgcgggacttaacccaacatctcacgacacgagctgacgacgaccatgcaccacctgtgaacccgccccgaagggaagccgtatctctacgaccgtcgggaacatgtcaagcccaggtaaggttcttcgcgttgcatcgaattaatccgcatgctccgccgcttgtgcgggcccccgtcaatttctttgagttttagccttgcggccgtactccccaggcgggatgcttaacgcgttagctccgacacggaacccgtggaacgggccccacatccagcatccaccgtttacggcgtggactaccagggtatctaatcctgttcgctccccacgctttcgctcctcagcgtcagtaacggcccagagacctgccttcgccattggtgttcttcccgatatctacacattccaccgttacaccgggaattccagtctcccctaccgcactcaagcccgcccgtacccggcgcggatccaccgttaagcgatggactttcacaccggacgcgacgaaccgcctacgagccctttacgcccaataattccggataacgcttgcaccctacgtattaccgcggctgctggcacgtagttagccggtgcttattcaacgggtaaactcactctcgcttgctccccgataaaagaggtttacaacccgaaggcctccatccctcacgcggcgtcgctgcatcaggcttgcgcccattgtgcaatattccccactgctgcctcccgtaggagtctgggccgtatctcagtcccaatgtggccggtcgccctctcaggccggctacccgtcgaagccacggtgggccgttaccccgccgtcaagctgataggacgcgaccccatcccataccgcgaaagctttcccagaagaccatgcgatcaactggagcatccggcattaccacccgtttccaggagctattccggtgtatggggcaggtcggtcacgcattactcacccgttcgccactctcaccaccaagcaaagcccggtggatcccgttcgacttgcatgtgttaagcacgccgccagcgttcatcctgagccagaatcgaaccctccacaaaaaaacttcatgaaaagcatccgaatagatgactctcaaaacaaaaattgacgagcacgtccttaaggaaggacgccctcaaaaaacctcacccctcatcaaaccctcccgggtacccaaccaccacgacaggcaatcaggcgaggaatgaactggcaatcattgactataaagaagtagtacaaacacgctcttgagttctcaaaccaccaccacaccagccagacgggaaaccaaccagaggaaggaacccgccgcgctgagcggcaacaggtgaataacttacacgcatgtccggattcacgcaaatcaaggcacgcaaaaaccccaggaatcggcataacagcgcggttccctcggcgtgtcgaaatcgacgtttcgcacgtctatatcttcagtctagaactagatatcgtcgaaaattggattgaaaattttggtcgatgggcgtgtcgcgaattacctcttacggcgcatgtggtgcaccgccaattatcggaatcatcattgatccagtacaccgataagaaccattatgtccggatcactatctgctcgccagtcgcgcaccaatcaaccgcctggtagcgatgcggttgccgtaccgcttgccttggcacgaccaacgaccgaatggcatcagcacattcagaaccgccggtccgatccacacatcgcagcacagatcagtcgtggtcccacgggtatggggaggccccgttgccgtgtgggtgccggaggtgtcctgtttgtgtccgggcatgcgagaagccccgggtgtttttgtgggggtgtgtgggtttgggtcgtgagtgtttcgggtatgcgaaagccccttggggcgtgtgctccaaggggcttcctgtacgtgtgatgcggcggcgtgctactctcccacaccctgtcgggtgcagtaccatcgccgtgccaggccttagcttccgggttcggaatgggaccgggcgtctcacctgggccatggccgccgcaaatcttctcttgtacggtcagacgctggggtctgccggcctgtggcggcctgggaaccggacagcggacgcggatatgtcgatgtttcgtcttgtggccagacaatgctcattgccgtctggtgccgtttgcaggaggaagatgcggtccaaccgccaggggttggaatgttagtgttgcctttcgtccgttagtaccggtcggctccacccctcgcggggcttccacgtccggcctatcgaccacgtgttctgcatggggactacaggaactcgaaggttccacggaatgcttatcttggagcaggcttcccgcttagatgctttcagcggttatcccttccgaacgtagccaaccggccgtgccactggcgtgacaaccggcataccagaggttcgtccacccaggtcctctcgtactatgggcaggcctcctcagcattccaacgagcgcagaggatagagaccaaactgtctcacgacgttctgaacccagctcgcgtgccgctttaatcggcgaacagccgaacccttgggacctgctccagccccaggatgcgacgagccgacatcgaggtgccaaaccatcccgtcgatatggactcttgggaatgatcagcctgttatccccggggtaccttttatccgttgagcgatgccgcgtccgtacaccggcaccggatcactagtcccgactttcgtccctgctcggaccgtcgtcctcgcagtcaagcccgcttgtgcacttgcactcgccacccgattgccaaccgggctgagcggacctttgggcgcctccgttactctttgggaggcaaccgccccagttaaactacccgccaggcactgtccctgaacaggatgactgttcgaggttagacatccaatgcgaacagagcggtatttcaccttgcggctccgcgcgatctggcgaccgcgcctctcggcctcccgcctatgctacacaatccacaccgaatgccaataccaaggtatagtaaaggtcccggggtcttttcgtccttctgcgcttaacgagcatctttactcgtactgcaatttcgccgagctcctggtcgagacagtggggaagtcgttacgccattcgtgcaggtcggaacttacccgacaaggaatttcgctaccttaggatggttatagttaccaccgccgtttaccggggcttgaattcaccgcttcacccgaaggctgacggatcctcttaaccttccggcaccgggcaggcgtcagtgcatatacagcggcttgcgccttcgcatgcacctgtgtttttggtaaacagtcgctaccccctggtctgtgccacccccaaaagctcccacagcaagcgtgttcaccatcgggggtctcccttaaaccgaaggaacgggagtgatttgccgagttccttgaccaggattcgctcgatcgctttggtattctctacctgaccaccagtgtcggtttggggtacgggcggcttcgagcctgacgccgaagcttttctcggcagccgggatcaccggatatcgggccataaggcccccatcatcgcacctcggacccatgcgggacggatttgcctgtcccacgccctgcgtgcttgaccacggaagaccacctccgcggccggctacccttctgcgtcactcctgcgctgacctactacaaggatcggtcccaacaggccagggcatcccgcccccgaaggagcagtaagcccggacccggaggttagtactccaagcctcggttttggcggctgaaagccggtacgggaatatcgacccgttcatccattcgactacgcctgtcggcctcgccttaggacccgactcacccagggacgatgaacgtggccctggaacccttggtcatccagcggacgggatcttcacccgtctctcgctactcatgtctgcattctcactcccatgaagtccacggcgcgttcacacggccgcttcgcccctcatgggacgctctcctacccagtacaaaatactgccgcgtcttcggtggtgtgcttgagccccgctacattgtcggcgcggaaccactagaccagtgagctgttacgcactctttcaagggtggctgcttctgagccaacctcctggctgtctatgcgactccacatcctttcccacttagcacacgcttcgggaccttagacgacggtctgggctgtttccctttcgacgacgaagcttatcccccgccgactcactgccgggatacgcgtcaccggtattcggagtttggttgctgttggtacccgatacgggcccgcaagcatccagtagctctacccccgggacgtaatgacccgacgctgcacccaaatgcatttcggagagaaccagctatcacggaatttgattggcctttcacccctagccccaagtcatccccccggttttcaacccaggtgggttcggtcctccacgcggtcttacccgcgcttcaacctgctcagggctagatcatcccgcttcgggtccaggacacgcgactcaaacgccttttaagactcgccttcgctacgcataccccacacgggttatgctcgccacatgccactgactcgcagactcatttttcgataggcacgccgtcaccccacaaaagggctccgacggattgtaggcgcacggtttcagagactgtttcactcccctcccggggtacttttcacctttccctcacggtactcgttcgctatcggtcagacaggaatattcaggcttacccaacggtctgggcggattcgcacggggttccacgggacccgtgctacttgggagacgcgatcggcagaccatgcgcgttcaggtacggggccctcaccctctgcggcccggtattcaacccggttcccctgacacatggttttctgcaactgccggccggcccgtcggagccggcgcacgcgatcccgcaacaccccgcgcgcaacccccgacgggtatcacacgcgcaaggtttggccatcatccgctttcgctcgccactactcacggaatatcctttcctgcaggtactgagatgtttcacttccctgcgtaccccccggccgaagccggtaccgacccatgacggtcggtgggttcccccattcggaaatcctcggatcaaagccctgttggcggctccccgaggcatatcgcagcctcaaacgtccttcatcggtcctgtctgccaaggcatccaccatacgcccttgcaagcaacacacaccacgaaagtgcatggccgcaagattcctctagcaaattcccagacgacaaatcatcacactaaaaatgatcacaaaacgatcgaaacgaacaatagagttcgattcgaaatcaacagcaaaacaaagattcaaaaacccttgttttgctcgcgtccactatccagttctcaagccaccacgcaccgccacgccatcgcgccggcacacggccggcccccaggcacgacgggcatcgaatcgcgccaggcaaaaagcctggggtggcgatccgggagcccaaaagcgcatccataccaccccgcacccaccgcacgaccggcagggcaaagccaacgacgtcttccacaccagcaaccccgccgccatcgcaccatgcgacgcgcggggcgcacaccgtcggacgaacatccgactgaattctccgtagaaaggaggtgatccagccgcaccttccggtacggctaccttgttacgacttagtcccaatcacgagcctcaccttagacggctccatcccacaaggggttaggccaccggcttcgggtgctgcccactttcatgacttgacgggcggtgtgtacaaggcccgggaacgcattcaccgcgacgttgctgattcgcgattactagcgactccgccttcacgcagtcgagttgcagactgcgatccgaactgagaccggttttcagggatccgctccgcgtcgccgcgtcgcatcccgttgtaccggccattgtagcatgcgtgaagccctggacgtaaggggcatgatgatctgacgtcatccccaccttcctccgagttaaccccggcggtcccccgtgagttcccggcataatccgctggcaacacggggcgagggttgcgctcgttgcgggacttaacccaacatctcacgacacgagctgacgacgaccatgcaccacctgtgaacccgccccgaagggaagccgcatctctacgaccgtcgggaacatgtcaagcccaggtaaggttcttcgcgttgcatcgaattaatccgcatgctccgccgcttgtgcgggcccccgtcaatttctttgagttttagccttgcggccgtactccccaggcgggatgcttaacgcgttagctccgacacggaacccgtggaacgggccccacatccagcatccaccgtttacggcgtggactaccagggtatctaatcctgttcgctccccacgctttcgctcctcagcgtcagtaacggcccagagacctgccttcgccattggtgttcttcccgatatctacacattccaccgttacaccgggaattccagtctcccctaccgcactcaagcccgcccgtacccggcgcggatccaccgttaagcgatggactttcacaccggacgcgacgaaccgcctacgagccctttacgcccaataattccggataacgcttgcaccctacgtattaccgcggctgctggcacgtagttagccggtgcttattcaacgggtaaactcactctcgcttgctccccgataaaagaggtttacaacccgaaggcctccatccctcacgcggcgtcgctgcatcaggcttgcgcccattgtgcaatattccccactgctgcctcccgtaggagtctgggccgtatctcagtcccaatgtggccggtcgccctctcaggccggctacccgtcgaagccacggtgggccgttaccccgccgtcaagctgataggacgcgaccccatcccataccgcgaaagctttcccagaagaccatgcgatcaactggagcatccggcattaccacccgtttccaggagctattccggtgtatggggcaggtcggtcacgcattactcacccgttcgccactctcaccaccaagcaaagcctgatggatcccgttcgacttgcatgtgttaagcacgccgccagcgttcatcctgagccagaatcgaaccctccacaaaaaaacctcatgaaaagcatccgaatagatgactctcaaaacaaaaattgacgagcacgtccttaaggaaggacgccctcaaaaaacctcacccctcatcaaaccctcccgggtacccaaccaccacgacaggcaatcaggcgaggaatgaactggcaatcattgactataaagaagtagtacaaacacgctcttgagttctcaaaccaccaccacaccagccagacgggaaaccaaccagaggaaggaacccgccgcgctgagcggcaacaggtgaataacttacacgcatgtccggattcacgcaaatcaaggcacgcaaaaaccccaggaatcggcataacagcgcggttccctcggcgtgtcgcacagagcccactttgctctgatgaggctaggttaacccctcaaatgtttctgaaaagcatcaaatccactattcggctggcgtgtcgcgagagttttcagcttgtcggccctgcgttcatctctcggcaaccacactgccggcgcacaatcggcgcatgacagcgctccgtcatcggatttcgttcatgaatcgcgggtatacctgtagttatgaccaagaagattgctgtattaaccggggcgggcatttccacgtccgccggcatccctgatttccgcggtccggacggtgtgtggaccaagcatcctgaccaaatgagcgtttacgacatcgatctgttcctgcgcaacaaagaggaccgcgagtactcctggcgctggcaaaaggaatcgccagtatggaatgcgcagcccggcactgcgcataaggcgctggtcaagctggaacaagccggcatgctgacgctgctggccacgcagaacttcgatgcgctgcatgagaaggccggcaacagcgacaacgtcatcgtgaacctgcacggcactatcggcacctcgcattgcatgaagtgccatcaggaatatgccacggcggacatcatggcccgtttggatgaagagcccgacccacattgccatcgcaaactgaagtatcgtggcgatatgccgtgcaatggcattatcaaaaccgatgtggtgtatttcggtgaggcgttgccggacggcgcgatggagaagtcgtacagtctggccaccaaagccgacgaactatgggtaatcggatcgacccttgaggtgtacccggcggcgagcattgtgccggtggccgcgcaggcgggcgtgcccatcaccattatgaatatgggtcacacgcaatatgaccatcttgcgagccgcttgattcatgaggatatcgccgttgccctgccgaagttggtggacgagacgattgcggagaacaagtagccctcagcataacgaaagcgccggtgggtgggttaagcaactgatgattgtcggttaaccacccaccggcgctttcgcgccacctcccgccagcgggaggtattggagcacacttctgcgcggcttcccgccagcggtattggaatcagtagatgcgcttgggctggaatccggcttccctgagtgccgcgaggatgcggtcgatgtgctcggggccgttggtctcgaccgtgacgccgagagacaccgcgttggtgtagtggccggatgccttgaactggtcgtgatcaagctgaatgacgttggcgcgctgctcggcaagcagggtggccaccttgacgagctggcccggagtatccggcagctcgacctcgaagttcatgatgcggccgcgggcgatcatacctttctgaatcaccgcacccatggtcacggtgtcgatattgccgccggacataatcggaaccaccacgtgcgggccggtggcggcggcgaacttgcgcgaacgcaggttcaggtgttccagcgcagccagcgaaacggcgccggccgcctcgaccaccagcttatgcttctcgagcatgagcagaatcatttcgttgatgtcgcgctcggtgacggtgaccagatcgtccaggaactcgttaatcagagcgaagggcaggtcgccggggtgcttgaccgcaacaccttcggcggaggtaaccacatggtcagccggagacacacgacccgcggccagcgagtccttccaggccggtgagccctccggaatcgcaccgattacgcgcacttcaggcttgaatgtcttgatggcgagcgccacgccggcacccaggccaccaccaccgagcggcacgaccacgtcagtgacgttcggcacgtcttcaaggatctccagaccgatggtgccttggccgcagatgacttcgtaatcgtcgaatggcggcacgtaaatcatgccttccttgtcggcgagctcagcagcgtgggcggcggattcatcgaacacatcgccgtacagcaccacgtcggcaccgtaggccttggtggcatcgaccttcagcggcggggtgatctgcggcatgcagatggtggccttggctccacgctcgcgggccgcataggccacaccctgggcatggttgccggcagacgcggtgacgatgccgtgagcgatctgctcttcggtgagcgaagcaatcttgttataggcaccgcggatcttgaaggatccggtgacctgcaggttttccggcttcaggagaatctcatggccggtcatctcgctcagcaccggagaaggaatgatctccgtgtggcgggcagtgcctttgagtcgttcggcggccagcttcagttcggctgcatgatcacgttgcagcgccttcaaaacatccttttgttccatagctttccattgtaagcaccacaatgccgagagacaccagctatctcgcttcacagaggtacattcggccttttgcagacagctatctgttttcataggggtaccgagaagcaaaaaccccgggtataagccttgattttcaatgcttatacctggggtttcgacgttacggtacctctctcaagacagatagcatttcgggatagccccgaagtacctctttgagcggagaaaggcactcaatgcactacaactggatgacggctgcctcccacgggtcgagctcgcggttggcaagggaggccacggtgtgcggagcgtcatacgtgctgatcaccacattcggctcggcgattccgacggcggttagttcggcagcctcacgtggcaggtcaacggttcgactggacatattgactacgaccaacaacttctcagcgtcgagctcacgggtaaaggcatagacgtgcggatcagcggcgtcaatcagtcgccagtcgccggcggccacgaccgggctgttgtgacgcagcgcaacgagttgcttgtagaaggagtacaccgaatccggatcatcgaattcaccggcggcgttgatctcggcatgattcggattcacggaaatccatggctcagtggcggcgtccggagcggtgaaaccggcgtagccggaaccgtcccattgcatcggagtacgcgcgttgtcacggctgcgcgcggccagaccggccatcattgactcagacgactgcaccttggcctcctcgaccctctgccggtaggcattcaaggattcaaggtcacggtactggtcgagacgcgtgaagtgggcgtcggtcatgcccagttcctcaccctgatagatgtacggggtgccgcggtgcatgtgcagcatcaggccaagtgccttggccgaacggacgcgggattcctccgcggagtcgtcgccccagcgggagaccacgcgcggctgatcatgattgccggtgaacaagctggcccatcctgcgttctgcacggcagtctggtaaccggccataatgctcttgaatttcggcaggtcaagcggcagcggcttccacttggtaccttcgcaatcaaaatcaacatgctcgaacaggaagagcatgtccaattcaccgttgcccggatcagtgatgtgctcgttacgctgagccgtgacgcctggcgcctcgcccacagtcaggaagccttcacgcccctcgaatacctcacgtcgcatttcagccaggaattcatcctgacgggggccgtccgcacagaacggattcgggttggaatagccctcctcgcccacaggaagatcctcaagctccgagccgtactcgcccggcagcttgccgttcgaatcggtgcgcttggagatcagggtgatgacgtccatgcggaagccgtcgacgcctcggtcaagccaccagttcatcatgtcgtacacagcgcggcgcacggcagggttctcccagttgaggtccggctgcttcttcgagaactgatgcaggaagtattcgccacgctcggggcagtattcccatgcggagccgccaaagtaggagccccactgattgggctcggcgccgggctcgccgggcgtggtgccgggacgagccggacgccaccaataccagtcggcgtgttcgtcgtctttgttcttggatgcttcaaaccaggcgtgttcatcggaagtgtgattgacaacaagatccatcacgatcttgagcccacgcttgtgggcctcggccagcagctcgtccatatcgtcgagcgtgccgaacagaggatcaatgtcctgatagtcggaaatgtcatagccgttgtcgtcttgcggagacttgtataccggggatagccacagcacatccacgccgaggtcggccagatagtcgagccgtgacgtaatgcccttgagatcgccgaggccgtcgccgttggtgtcttggaaggaacgcgggtaaatctggtaaacgaccgcattggaccaccacggatttggggtggcaccgttggtgcggatggaatctggaattactgtgcgttgtgaagtggtcatcgttggctcctccattatttatggtctacattgcctgttgctcatagtctaaaaagcgctgaattacatttccattggggaactgcgttggtgtgccggaaacaaaaactgcaaagagccggaaggcactgctacggctcaattctcataagctgcacatgctatttagcaacatatgggccctttcgctgtttgtggtgggtgactgtgccgtggggtgatgttggtcgggtaggttggaggcatggatgcctctcacctgttcaccgccgcgcttcggctgcggtcgccttggagggtcgggtctgcggacttccgtgacgccgacgtcgacgggcgggagccgcacatcacgatcggcttcgagcccggcagagggttcatgctcctgttcgaggcgtgggtgtggctatatcgcctgtgctcgtggatgatgcactcgaggctcgaacctatgaaggagctcgcccgcttgttccgccgccacttcgccaccataatctacctgacctgcggcagctcacatattaacggttcttctgattgcgacgcgcaagagcaacttcgggcgcgcttggattgtctgcttgaacccactggtgcggggatagatgatttagttgacacgcctgcgggaatctggtggggatttcgctggcacaccggatttcaagcaaaccccgcctcgggaaccgctccggacttcggcgttggcccggttcgtatgtcaatcgattgccgtctgaaccgggacagaatccgctgtcccggttcgcgatttttgtccttttttacaaacagggacaagccaatctccgcaggtcatatgctccgtaatacaaaatcggcggaatagagccgatcccggaatcaacatgttgtcccggttttcacataaaacgattgacattcataccgggacaatgaaaattgtcccggttcgtgaaaatcgcccgaaaccgcgaaccgggacagcggattctgtcccggttcgcgcgtcaaacggttgatatgtggaccgggacaagccagtggcacggcgacacagcagatgcgctcaattgcaccgtaagccgtacggtttcgtcactttttcattcgcacaacgagcaaaaccacatgacctttgtgcgccaccgccacatcaaccgaccgtcgcctttattgtggcggtttccagtatggcaacaggacagaagagcctcctccggtgagagccggaggaggcttgggtggaagcggacctttacttcacagagtcctgcaattcaggactggcctacggccagacccaacatgacctcgcgagtacgcgacctatccggccgcccgggccgggaaacagcccacggggctgtttccttaatcggctcgtctcgctcgacgcggtgaagtaaagcagcgcctgcgctgttttacttcaccgctcccctcatcacaccaccgacgacccacttctgggcgaagatgtagacgatgaggatcggggccatggccatcaggtagctggagaaggccatcgggtagttggtggcgaactgcgagctgaagacgtactgggcgagcgggatggtctggttcgactgatcggtcagaatgatcaacggcaggaggaagtcgttccaggcccacagcgcggtcaggatggcgatggtggcgttaatcgggctcatcagcgggaagatgatggtccagaagatgcgccaggtggatgcgccatcgatgcgggcagcttcttccagcgataccggaatcgaacggatgaagccggtggcgatgaacaggttcgtgcccaggccgagcaccgtgtacagaatgatcaggccgacctggttgtccaggtgcagggagcccatctgcttcgcaatcggcagcatgacgaccgggaacggcacgaacatggcggcgatgaagaagtagtacaggaagcggaagaagcgcttgtccatgttgcgggccacggcgtaggccacgaaggtgttggtcagcagggtgagcaccacggcggccaccgtgatgatcgcggagttgagcgcggccttcgggtagttgaccttggcggaggcgtcggcgaagttatgccactgccacgaggtgggcagggcgaaggtgccggcttcggccggggtcttcagcgcggtgacgatggtgaagtagagcgggatcagaatggtcaggctcagcacggccacggcggcggtcagccaccagttgatcttgtggtccctgcggaacttggcgggcttgccggacttggacggggtaactgttgcagtagtcatttcttatcctcccctaaatcagatctgttcctggctgcgggagatgcgcagctgtacgaaggcgatgatcgccagcacgatgaagaagagcacggcgtttgcggtctggtaggcgtactcgccaccggtcaggccacccttccagatgaggtaggtgacggtttcggtggaggagttcggaccgccctcggtcaaggcgacgacctgatcgaaggtgccgagcgcgttcttcatggacagcacgaggttgatggtgaagaacggtccgatcagcgggaatgtgatcttccagaacttctgccaggcgttgacgccgtcgatggcggcggcctcgtagatttcgtcgtcgatggtctgcaggccggcgaggtagatgagtaccgagtaggcgatgccctgccagacggcgaggaagacgattgggatccagctgagttgctcattggtcaacagcgaggtggacagccacttgatgcccagcgccttgccgagctcgggcagcgggttcatgaagatgtacttgaacacgtagccgatgaccagcacggagagggtgtaggggatgaagaagatggctcggaagccattcttgaaggcgatcttcgagttcagcagcaccgacaggaacagggcgatcacattaatcagcaccgtgatgagaatggcgatgaggaacgtgaacaggtaggcatggcccactcggttgtcctggaagagggcgatgtagttcttcaggccgatgaacttgtaatcgccgtagccctgcgagttggtgaaggaatactttacgccatcaagaaatggcaggtacaggaagaaggcgaagatgatggccgccggaaccaccatccagtagtaggcggggtccactttgcgggtggagaaggcggagaccttcttcttggccggtttcttggcagcggtcttggttgcggttgcgtgtgacatgatgttctcctctcctaccgatcactcgaaggtcctggcttggaccttgtcccattcggtctgcatctggttcaggaagcggtcggtgttgccggaggtcaccatggtctgcaggtagccgccgatgttgatggacgaaggaatgtagtggtcgcagaagtcggccagtcggttttcctcgaagaacgggcgcacggtttccagcgcatcgttgccgaagtaggtgtccttcagcggcgtgatggcggactgggcgtcggcgtaggcgtcaagctgatccttctgcatgaggaactcgacgagcttcatcgcttccttggggtgcttggtgttcgcaccgatggtgagcatcacgtcgtcgccggcggtgaggatctgctcgctggcgtcatcggtggccggcatctgggcgaaaccaagttcgatatcggggttgatcagcaggatctgcgggatggcgtaggtgccgagcgggatgatcgcggccttgccttgggcgaagttctgcgtgccctgctggtaggtgacgccggtgtccgcagtggagtaggtgaagagctcggattccttctcgactgcggtcttccacagttcctggaacgtggtcttgccttgcttgagctcggtgtacttcgattcgggaaccagcgtgccggtcagggaggcgagcggtgcctgggtggtccaggcgtcggccacggaaccctgcagcgggttgatgccggcgtccttgaaggtgttgagcatatcggtgaactcgctccaggtggtcggcgggttctccgggtcaaggccaaccttgcggaacagagccttgttgtagatgtagccggaggcgttacccgcgaagggcaggccatacaggcgcttcttggaggaatcggtggtctgcaccagattcttggcgatctgcaccatgccggggttgagggtgtccacaatgggttcatcggtgaagtcgtagaacacaccggaggcggcgaagttgccgaagctgatgtcgccgttgaaggtgatcacgtccggcacgcgattcttgacgaagcgggtgcgcagatcggtctgggcgttggcggagttgttgatgttgaccttgatggtcgggttttgcttctcaaagtcggcgaccatggacttgaactggtcggcggcctcggacttgaactggaagaaatccagcgtgacggtgcctgcggtgctggagccgcagcctgccaggccgaagccgacggcgatcgcgcacaccacggcggcggtgcgcacggccagacgcttcagtccaggcgttgcatgtggggaatcggacagcataattgttgactcctttatctttcttttcctccggcttcggtgccggcggttcttccactttccaaggtaacggttcggccatttcattcccagcgccagcgagcccacttgcgcaagcaacaaaaagcgcggtattttgtgattaacgcaataaatacagcgaaggggcttgcatgtctgatgtcaacgcgattccacagtggttttccggatccgagcatacgcatcgcgtggcggcggcaattgcccaatacgggccgatagcccgcactacgttggcacagatgctgggactgagccaaggggccttgtcccgcatcaccagcgatctgatctacgccggggtgatcgaggagcttccggccgaggccggcccgtcaggcaagctgcccgagcgattcacgccaagggaaagttcggatcgtcgcggacgcccgcagacttcgctggtgttgtgttcgaacgcacgcaccttcattggtgtcaaggttcatgggatgtcgattgtggccgctgcggtgaacgcgcatggcgaggtggtgtccggccggcacgagatgccgatcggggcggatcagtcggctgagtatgtggtgtcggccatcacgcggctggtgcgcgaatgttccgccgatatcgcctcttccggactaccctcccccactgcggtgggcgttgcggtaggtgggcatgtggtcgacgattcgattgtgacgttcgcgccgttcctgcattgggacggggccacggacttggggacgatggtcacagaggcgaccggcctgccgtgcggggtgttcaatgatatcgattctctgctggtggatgcctcctggttcgggccgggtgtcggcgtggatatgttcgccgtggtgaccatcggcgtgggtgttggttattcgctggccgtgaacggcaagccagtgcagtacccggataagagctatggtctggtgggccacgtgcttatcgatccggaggggccgcgctgcaccagcggacatatcggctgttcacaatgcttgactgacgattcaatcgccgaacagtactctgcgattgtgggtcgcgcggtcagttttgaggactttgcgcgcgatgccaaggaacgcgtgccgcaggccacgcagttggtgaaccggacgtgtttccggttgggatcgctggtggctacggtggcgaatatcgcgatgcccgggcatgtgatgattgccggggagtccgcgtttttggccaagctcggcaccgattcgctacgtgacggcattcgtttctaccgtcacagccagacccagccggtcaagttcacgattatgaaccacgactggcagctctgggccaaagccgccgccagtcgcgtgattgtgaagcatattgggtaggccgttcttggctcccctcagagaggggagccaagaacgttgcttcgccacagttactccgccacgaccagcaattacggacttgcctatcggcaaggctcaatcccaccttcgctcagctgtcgcttcgctcaggccgtggctactgacagcctactaggctgtcagcttaacgccacagccttgagcaatactgcctgctgggggtggagggacgggggacgaatgccgtagcgctgcagggcttcgccggtcaggactacgccttcctcgttccaccagccgagagtgctctggccgttggtcagaccggtcaaatccaagctcgggtcaagcgggctgacacggtaggtgcgctcggggtcaagtccgggcagatgcacgggcacggccggataggtctggctggtggtcagctgggtgaagcggtagatggcggcgtcacggttcggcatcaccataccgtccagacgcacggccggatcgttggagtcggcgtgcacgcaggtgtcgatggcgaaccagtcgcggtgcttcttgaattcggccacccacacggccagcttggcgagcgcctcgtccggctccttcaacaggttccattcgatgcccatgtgaccgaagaacgccatggccatgcgcagttcctggctggtggcgcgctgggtggagtgtgcggggctggcgcccacgtgctcgcccatcatcgccggcggcaccagcagcgaggtgtagcgctggatgtccgcgcgctcgaccgggtccacgcagtcggagacccagatacgatcggcgtgctccaggatgccaagatccacgcggccgccaccagaggagcagctttcgatctcaaggcccggatgtgcggtcttgaggcccttgaagatgttgtagacggcaagggtctgcgcgtgcacggccgggcggccggagcggcgggaaccgggctcggtgacgagcttgttgtggtcccacttgatgtagtcgataccaagctcgccgacaagctggtccatgcagccgtagatgtagtcgaacgcatccggattggtcagatcgagcacctgctgagtgcggccctgcagcggcagtcggccagcggtgggcgagagaatccaatcagggtggttacgggccacatcggaatcggggttgaccatttccggctcgaaccacaagccgaattccatacccttggcgtgcacgtagtcggcgagcgccttcagggacttcgggccatcgggccagacgtcctgcgcaatctgccagtcaccgaggccggaggtgtcgtcgcggcgggaaccgaaccagccgtcgtccaccacgaatcgttccacgccggagtcggcggccttgtcggcgagcgccttcagcgtatcgaagttgtggtcgaagtacacggcttcccatgtgttgaggatcaccggacggccgtgcgagaacaggcgcgggtgcagggagcgcacgtaggagtggaatcgggcggcgatctcgttgagaccatcgccataggagccgaacagccacggggtgtcgtaggagttctggccttcgccagggccagcgagcgtcacttcgccgccgaacaggagttcgccgccgccgatcacgccggttgtgtagggcagacgttcggcggacagcacggagttgccgctccagcccacgtgcaccgaataggcgtcgccatgctcgaagccgaaaccgggcacgccggcggtcaggagcagggatgcgtcgaagtcagggcggccggcgagctgcggcttttcgaaacggccgacggtcagcggctggcgctgcggactgcgttcacgtagatggtgaccggtggtggtgaggatttcgccggcggattcgggcagcgggaagccgagctcgatcttgccgatctcgagcggggctccggcgtctgcaccgaacaggttggttacggtggccttctgacggaccaggccgccggggagcagttcgaggtgccattcgacttccacgccctgctcctcatcgcgcgcggtgactatgacgccgggcacgcggaccggaccggtggcacgggcatggccggccacatcggtgtagctttcgccggacacggcatcgagggtggcttccagcacgccgccggccttgatattggtcacggtgaacttggggaagagctcgacgccggcgcggcgcagcaccacgcgctgctcgccgatccagctttcggcctgggtgggcaggatagacggccaggcggtgtcgtcgagcgcgccggacacgcgctgcggcttcagggcgtcataggcggccagcagggtgtcgggcttggccagcgggcggccccagtggacgatgtgcggcaggtcgctgccggcaaacaccagaccgatcgccacattggcggcgggctgggtcaggtagacggcggtgagtgcggtgccgtcagcggcggcgccggtgaaagtggaggtgttctcggccatattgtctccttcgacgtgtgtggatttgcattgcactactggtttcgatggtagaagaaatggaatatgttgccttggtgccgcgtgttggttgcgtgaggtaagtaatgcgtccgtgtctatcgccgctgggcgaagaaatcagtcaggatggactgacactcgccttccagcacgccgccgtgcacttcaggactatggccgatatgcggatcgcgcggaatatcccaaatcgaaccgcatgcaccgagcttgggatcccaggcaccgaacgcgatggtgccgatatgggtctggatgcaggcacccgcgcacatcgggcacggctcaagtgtgacggccagcgtgcaatcggcgagattccaagcgcccaaggcttgggccgcctgacgcatggcgatgatttcggcgtgggcaagcgggtcaccatcagcctcacgcgtgttgtatccgcgcccgacaatctggccggccgcatccagcaccaccgcaccaaccggtacgtcaccagcggctgcagcctgaccggccagttccagtgcgcggcgcatcgcctcgtcatattccataccaacgagtgtatgccttttctcatatcgtctcatgatgtgcataatcggccgcaagcttaacgttttcttcatggttcccatatacttttggtggagaaaaatttaagggagaaggcggcaacatggcggtatttgagctcatcctatgcatcattgcggcggtggtggtgagctcgtttgtcagtcgcttcgtgcccaaagtctccacgccgctggtccagattgtgctgggcgtgctggttacgtatctgccgtttttcccggatgcaacgctcgacccggaactgttcatggtgctgtttatcgcgccattgctgtatttggaagcccacgaaatcgataagtcggcgttgctgaaaacgctggatctgagcctatcgctggctatcggactggctatcgtcacgatggcggcggtcggattcactttgcatgccgtctggccgtccatcaccttagcctcagccttagcactcggcgcggcactcggcccgaccgatgcggtggccgtcagctccctcggtaaagaagcctcgctgacgcagcgtcagcgcagcgtgctgaaaggcgaatcactcttcaatgacgcttccggcatcgtcggcttccagttcgctctggccgccgccttcactggagaattcgccgtggggcaggccgccggcgaattcgtgatctccttctttggcggcaccttatttggcctggtgatagcagcagcggccaactggctattcgagaccgtgcgatccctcggctgggaaaccactaccacacgtattctgatggaactgttcctgcccttcctgctgtatttgggcgcggaggaattcaatgtgtccggcattctgtcggtggtggccgctggcctgttcatccgattcgaccgcaccggcgtggggccgaatgtggcacgtacgaatatcgtttccacttcagtatggggtgtgctgagtttctcgctcaacggtgcggtgttcattcttctgggcatgcagctgccgcgcgccatgagggccagctggtctgacccgtatatcagcaataccgtgctgatcggcattattctgctggtcactctggtggtaatcgcgcttcgattcttctggattgcggccatgctgcgcgttgcgcgagatacaatcaccggccagcgccgcaaaatgacacccgaacgctggcgctcggccgcagtgatgacctttggcggccccaagggaaccatcacgctgtcattgatgtttaccatcccgtattacattgccggcggtgcgccgttcccgatgcgtgacgagctgattttcattgcgtcaggcgtgattatcgtgaccttgctgctggccaacttcctgttaccgctattggccccgaaccgtggcaaggatcccagcgcggaaatgattccggtgaccatcgatgtgttacgcgccacggtggaggaattgaccggacgcatcacgccagagaatcgccgtgcgattctgatggtaatcgaccaatacaccaagcgcatcggacgattgcagcagcgcatcggcgataccgatcctcagggattcgagcaattgcagatcgaagcgctgcattgggaaaaggaattcgtgcgcgaccgacttgccgacaccaaggcgcatccggcggcggatacggccacgcaagagctgaacgtcgaagcctgcgagcgcatgcttgaccagattatgaatacgctgcgtcacacttccactgatccgacttcggggcatgcggtatcgcagattcgcggtcgcgtacgcatgttccagcggcagatgagcaattacgccaaacgcacggtgtccaagattcgccacaccacaccattggtgagcgaggaccagattttcgcgcgcacccgcgaactgcaggtcgaggcgattcatcatgttatcggccggcttattgacgagatgggccaggatacgtacaacaccgagcattgttcggcactgttgctggattatcgtcgtgccgaggcttcattgcaggcacgtccgaccatgagcggcactacggaaaccatcacgcaggtcgaggacgtaaagcgcgagagctacggtatcgaactcggtatgattcaggacatgtacgaagccggcgacatcaaccgagcccaagcccgctccctgaggcgcaacatctacgttatgcaagtggacgctgattccggcatctagtttccctggctcccttctctgaggggagccaagttggggattgctatttccgtatgattctcttcagtatgtgcagtagtgcttgcagtgctcacttcgctcatgggagaacagtctatgaccgcgccggccacaagcgccctcgatgtccgattgctgtgacggccgcgccaattccagtgatggcggctgactacagcacgccagaggtaatgtcgttgtcgagcagccactggcgcaaatcggcgaactcctcaagactcacattgtgatccagaccgtggtagctcttggttttcagccacgtatgctcttccaaccaagcggcggtggcgaacagttcgtatttcgggattacgccatcgttcttgccgtacgtatagaacacggggatatcgtaatcggccaggcgagagtcggcgggggccgtgccgggcacctgaccgggtgtgttgaagccggacagggagacgacggcccggtaccgctcggggttgatgcgcaacaaatgcacggcgaccagcccaccttgcgaaaacccaagcggcaccacgtcacggtcggcgggaatgttgtcggccacccatcggtcgactgctgtggcggcggcatacgcgtcgtagtcacgatcatcgccgataggcagggcatcgtgaaaccacgcgtagttgccggggtcgggactgccttcacgggccggcgcgagtgtcagcggcccgcgcagtgccacgaagtcgttatatggagcgatgaggcgcatgatgtccgccatgtcttcttcgctggatccccatccatgcaggcacaggaacagcggatgcgtggcatgctggtcgaagccgccgcgcgaggtgacgctgtgttccacggtgagtggctcgccaaaacgtccaggcacagtggtggattcgcggccgatcagaggctggctggcattcgcttctttgctcataccaatccaatatagaggtcttgcgcgctgtgcggaaaacgatggaccatgatttcaatcacattgggtaatccgcgccgaatcgccttgggacttttcaagggataccggcaatctgtcaggcgttaccgctgtctgcggtatctgcggctgcggtgattgtctcaagttcgccgccccactgctgctgcagtgcggtcatcttgctggcctcgccgaacaccatccagcgtttgccgttcagcaatcgccaatcacctttcgtttgctcattatcagcgtattggctcagcagttcggaaatcttgctttcgataggtgcccggctgatggctgcggacgattccgatccaaaggatacgaaggccactctcggatcagtgcacatctgtacggtggtgatgcccggcaaaccgcccgtatcaagcccctgccatccttctttgcacgcgccggcagcttgttcgatgccttgctccatctgtgcggtatcttcgacgggtgccttgtcgttcgactgctgaatcagtccttccgggaacaatacgcccacggccacgccgataaccaagcaaactatggcgcacaccagtgcgatgatgccgcccgcgcccactcccccgtgagtggcataccgaggcatggtgactcgcgcagcgatgaccagaatcagggtgatgccgataagcaccgccgccgtcaacgcaatgtatcgtcctggcactgccgtcataaaggaaatggcgtaaggcgcgatctcatgaaccgccgaggtggccgataccacgacggctagcagtccgctgacaacggcaagtctgcggcacaatatcgacgttgggctgctggcttttgtagcggcgaatcgccggccggcatcccgcctggatgggcgtcgattctgtgcacgacgtgagctgcgcgaatcgtcatactgaccatcgccgaagaaatcgtagtcctcatcgttgcgggccatcggtgcccccttcctgccgattacacagctagtgtaccgctatggcttgggaatggcggtcattcgggggaatgattcagggcacaaaaagaaccccggcggttgcccgccggggagagaaaggagagagaagaagaaagggggttcaattgtcgggaactgctgcggctcctgatcagctttccgctgacatcttttatataaccactgctttctgggtctacctctaagtttctctgagaaaaacctgagaatacttgcgattgatggaccgcggaagcgtgaggagcctctcacgtttccgcccaaggcgctagacttgaaggcagtatttatttgcccaaggagtttttcacatgctgctgtccgaccgcgacattctcgccgcacagtccgcaggtcatatctcacttgatccgtggacccccgaaatggtgcagcccgcttccatcgacgtgcgattggatcggtacttccgtttgttcaataaccacgcctacacctatgtcgatccggcggaaaaccaaggcgcgctcaccgaacagttcgaggtggctcccgacgaaccgtggattttgcaccctggcgagttcgcactgggttccacgtgggaatacgtcaagttggacccgtccattgccgcccgtctggaaggcaagagctcactgggccgattggggattctcacccattcgactgcgggcttcattgaccccggtttcgaggggcatattacgcttgagctgtctaatgtgtcgacgttgccagtcaaactatggcctggcatgaaaatcggccagatgtgcttcttccagctgagctcgcccgctgagcacccttatggctccaagggcaccggctcgcattatcagggccagcggggtccgacgccgagccgttcctacgagaatttctaccgcgcgcacatcgacgactgagcgttgcgacgtaccattcggccggcggatgccggccatttgcttaatcccaaggagatgtcatgaccaacagcgatggcgggttccagttcgacttccagcagcacgaaaagccggtcaggccaacggttcctccgattcccgggcaagagacggcagcatatagcacggaacccacggcacaagccacaccggctctgcagttcccgcagtctgtgcagtctgcgcagtctgcgcagcccacacagcccacacagtttgtgcagcccgcgcaagtagcgtatgcctcacaacccacgcaagctgtgccgaccgtacaagccgctcagccgacgcagcccatcgatccggccatgacgcaaccgttctcgccgcaattcctggctgcggttgccgcacaagcaccacagccggcggcagccacgcagccagtagtatccgaaacaccaatcgccgctgcgcccggccagcagcaatacgtttgggatcagacgacgcaaagcttccgcccggtggaaccgacagcgccggtgacgccagcagcaccagccgcaccagcggcaccggcgacatcgcctgtttcggtagcttcaaacgccgcgacacaggcgttccaacccaatcaggccgagcagcctgcggtagatgccgaggcaacacaagcgttccagcctgatcaggtcatggcaacacagcctttcgaagctcaggccatgccgaatgccgaaaccgcggccgcacaggcatacggcgcatcatccaccgtatccggtgagaccgttgccatgccggcaacgcaagtagcgtctgccgatgatgctgcagccacacaggtgttccaaccggccgccctggccgcttcggcacaggctcagcctgctgtgatgcctccctccattccgttggatcaggtctccgatgaggacgattccgatggcgccgagcctcgtcacggcggtagcggcaaaaagaacaccagcaagatcgtcggcattgccgtagcagtagtcgccgtgatagcgctggttgtcgccggcctgctctggtggcattccaacagcagcaaggcgagccaagccgtggcattggccgagtgcaaggtagcggccaagcagtacacgaatgctcagaagaagctcaccaccgccatatccaatggccaaaccagcgcgcaaacatccgccagcgatgtggccgatgccaatacgctcaccacgctaaatcaggcgttgcaagacgccggcaatccggctgacaccgccaagtgcgattccagcctcaacgccactgagttgaagtctcacactaaagagctgcagaatgatgccagcgacatggctgacaagacggatgccatcaacaacgcgatcaaggccgttaatacttcaaaggcgacggccgataccaacacactgaaatcgaacctgagctcggctatttcgcaggcgcagggcacgctggataattccgcgggcagtgtggccgatgaaaacacccgcaccgcgctgcaaaacgccatcaccgaggccaatacggtgatgaacgggaccagtccgtccgaatccgacgtcaataatgcgatttctaaactgcagaaggccgagtccgacgtcaccgcctcgatgcaggccaagcagcaggcagatgccgccaagcaagctcaggaagaggctcagcagaaggctgaccaagaggcacagcagaagtctcaagacgagtccaacaatagcgacaacaataacggcggcgacaactccacctctactgacggcactgacggcagcaacaactgaggtctgcagcgttctcctgtttcccatggggcggttagcatattttcctttttcgcggaataatgccgttttcagcgaccgccccatgggatagttaccgccccatgaggagccgtttggatatagcagtgggccgggctctgaataccagagcccggcccactgctatatgcccacaatcagggctattgcgatggcttaacgcttggccatcgcgcgtagcacaatcttgcgcagttcggaggcaatcagcacgattgcggccaggcagatgcattccacccaagccatcgggctcaatgccacggtgtcgaacggaccgttgaggaacggcacgtaaatcaccacgagctgcagcgccacggacaaaccaatcgcaccccatagccacttgttggagaacagacccacgaatgcggactgcagatgcgaacgggaggacagcgcgttgaacagctgggcaaacaccagaatcgtgaagcccatcgtacgggcctcggtcatctgcgcttcatggccgatggcatccaccgagcggtcggtgaacaagccgccggacaggtgcatgtccataccaatcagcgtgacgatggccatgatgacgccgatgtagatgatgtcgccccacatggaggcgtcaatcacgcggtccgtcaccttacgcggtttacgacccatcacatcgtcggtctgcgggtccacgcccatagccaacgccggcgcggcatcggtcagcaggttgatccacagcaactgtgtggcgagcagcggcacggtgacgcccacggtttccggctggcggatgccgaggaagccagcaaacaccacaccgaggaacacggtgaacacctcacccacattggaactcagcaggtagcgcaggaacttgcggatgttgtcgaagatcacgcgaccctcgcgtacggcggccacaatggtggagaagttgtcgtccgccagaatcatcttggcgctctgcttggtcacttcggtgccggtgatgcccatggccacgccgatgtccgcggacttgactgccggggcatcgttcacaccgtcgccggtcatggccacgatgttgccttggcgctgcaaggattcgacgatcttgagcttgtgctcgggggccacgcgcgcgtacacggacacttcggacgtggccttgtcgagcgcggcctcatcgggcagctggtcgagctggtcgccggtcagggccttgccatccttggcgatgatgccaaggtcggaggcgatgcgggcggcggtcagcgggtggtcgccggtgatcatcaccgtgcggatgccggcacgatgggcctcggtcacggagtcgcgcacctcagtacgcggcggatcgataatgccgaccatgccattccagatgagatcggtttcaatggcttcggcctgatcggcgatgtcggacacctggcctgcagcgttgacgcttacaccgggcacatcagacaaagaaccggtttccagcggacggcaggcctcgccaagcgtacggtaggcctcggaggagagacgttcgacggtggcgagaatcgactggcgatcgccttcggtgagcttacggacctgaccacccacgcggatgcgcgtgcagtagctcaacagcacgtcgggcgcgcccttggcgaacacggtgagcttgtctgaatcggtgctgtccttggcgatgatggacatgcgcttgcgttcggaggtgaacggaatctcgccaacgcgcgtgtatcgcttgatcttgcgatcggccttgaccttgcgtgcggccacgatcagcgagacttcggtggggtcgcccacaatctcccaacggccgttctcctcgcgtagttcgccgtcgttcgcgagcgtgccggccacgagcgtggcgacgacttcatcggccacaatctgggcctgctcggattcaggactgacgccgccggtcataaccatgcggccttccggcgcgtaaccggtgccagtaatctgcacttcgccggacggggtgaccacacgttccacggtcatctcgttgcgggtcagcgtaccggtcttatccgagcagatcacggaagcggagcccaaggtctccaccgaatgcagtttcttgacgatggcgttgtgcgcggccatacgctgcacaccaagcgccagcaccacggtcaggatggcggccaagccttccggcacggcggccacagccagcgagacagccaacagcaaggaatcaatcacgtcatggacgtcgttgaagccttccagcacggcgagcgccaccagcaccacgacagcgatgacgcacaccgcaatgccgaggatcttggagacgtaatccatctccttctgcagcggagttttctcatcttcggtggcggagagcatgtcggcgatcttgccgacctgcgtattcataccggtgccggtcacgattgcgcggccggtgccttgcgtcacggaagtgccgttgaagatcatgttggcgcggtcgcccagcgccttggcttcggtgagtgtgtccggcttcttgccaaccggcacggattcgccggtcagtgaagcctcggcgatgcgcaggctggccgcgttgaccagtcggccatcagcggagaccgaatcgccttccgcaaggacgatgatgtcgccggggaccacgtcggcggtgttgatgcgcatgaccttgtcatcgcgcagcaccgaggtctgcggggccgtcatttgtgcgagcgcttcgacggccgcctcggccttggcttcttgcatatagccgagcacagcattgacaatcaggatcaagatgatcacgatggcgtcgaacggcagcacttcgccgccttccgcgccgggctgcgcattggctttttcgatgaaccaagcgatcaccgagataatagtggccgcgatcagcaggtagaccagcggatcttggaattgggccaggaatttcttccatttcggtacgggcggggcgctggcgagctcgttcgggccgaatttggccagtcggcgcttggcttcttcctcgctcaggccgtgggatgggtcgacgttcagggctttggccacgtcgtcggcgctggtcagacttggatcagtatcccccaatagcgcttcctgtgcgcgcacctcttgcgattccacgaccccgttcgttgcggtcgtggacactgcggattgatctttgagatcatccataatgttctccttggtattgccgcggagtagtcagccttgcggccgctgccgggttttctctcccggctggacgcacaggactgcgcggttatggacaccggcgcaactgctgccgatgcatacgattgccattattccataaccgcgtggcgcacttggcgcacagcgtaatagcgttttgcctagaacaggcgacgcaaccaggcctcagccaaatcaggccaacactgcacgcattcgacgatgtgcgcatagaagccgttaccggcagtttccgcattggccaaggacaggccgtggctgccttcagggaacaggtgcgcctcaatgctcacgccggcggcccggcaggcctggatgagcattagcgtgttctccacgggcacggcgtcgtcggtcatggtatgccagacgaagacgggtggcgttttggcgtcgatgtgcttttcgatggagaacttgtccagcaaagcctgattgtgagcttggtcccctagcaggcattggaagctgccgcgatgggcgtacttgccggcggtgattactgggtacgagagcatcagcgcgttcgggcgcacggcgtccgggtccatgccgccctgttcgcggatgtcttcgtcgccgaccgaggtggcgaggttggcggccagatgcccgcctgcggaaaagccgagtacggccacttgcgcggggtttacatgccactgatccgcattggcgcgaatcaggcgcattgcctcggcagcctccagcaaagccaccggatagcggctgggctgcaccgaatagcgcagcacgaatacggcgaagcctttggccaggaattgcagggccactggctcggcttcgcggtcagaagtcatggcgtagccgccgccaggcaaaatcaggatggccgggcgtatacggtccggttccatctcctcgctgttgtcggccacatagccaaagaatcgcgcctcgctgccatcaatgccaacgatggtttgttgaatgtattgcatgccatacatcatacgcgcagagaatagttctcgataagaaccactcgccatatgcggtcttgcccgtatctccaaaccgaataacgcttacagcgaatcgtgaagactgcgggccatggcgcggtcgcgcgagcctttggtgagcttgagaccgagggtcacggcaatcaacacaacagtgcaggcgatccacaacgttcgaccgccgaagttgctgatagtccagccaccaatcagcggcgccagcgcaatcgacgccgaccacactacgttgtagacgccctgatacgtgccgcgcgccgacgcgggtgccatggcggcaaccgtagtggtggcgatagggaatgtgcccagctcacccagcgtccacagcactacggcaagcgcgaatccgccccaagaatgggccgcggcctgcaccgcatagccgatgacggttacggcgaggcccatcaccagcacgcgtgaattgcccatgcgcgcgaacagtttcatcgcgggaatctgcagcaggcacaacataccgccattgatggtgagcagcaccgaatactcgcccagccctagaccaaggtccgtcatggcaatgggcaggccggaggtgctttggaagtacacaaggaagtagccgaacatcagcagggagaagccgaggaatggagtatcggtgagcacgcgccgccaattgcgagacatggcgcccttgacactggcagccggtgcggcatccgagtgattcggcctctcaatgccggcgaattccgcatgggtaacactgcattcgtcttcatggcgcaccgcacttggcaccgatacagtaatccccaaatgccgcacctcgcggaagaacgcaatcagcaatatcgtgacggctatcatcaccgccgcttcaacgtagaacatcagcgaatacgagatcttgaccagctggttggccacaatcggtccaatcgcgtacccaaaattaatcgcccacgattgcagtacgtatgcacgttgctgacgttcggcaggcaccacatccgcgatatacgcggcgatggccgggctgggcagcgaggcgaacgcaccatagacgaacagagccgcgcctaaagacacaggatcagtgagtacggaaacgaccagcagggcagccgctgcgccgatttcgccgatgataatcatggattggcggccgaatctgtcggacaaggtaccgccgaacaggcagccgatgattgcgccgaagccgtacatggccacgactgtgcccaccacaccctcatcgaggcgcagcgcggaaaccaaatatatcgacaagaatgaggtcacgaagcgacccatccacagaatcagaatcgccaaccataatccccaatacagcagggacagtccgaatatcatacgctgcttcttcactctcaataccttaccggctaccgacggcggaatagccgcgttttggcgcggggtgctgggacaatagcacctatggctatcaaaaaaggaccgaccaaggggtcgggtggcaagcatcgcaacaaactgaagggctacggccccactcccaaggccgaggaccgcgtctatcacaaggcgtacaaggccaagaaagcggccgaacgtcggcagatggccgacccgcgtctggcagcccgccgtcgagtggacaagttcgcttcggcggatacttcggatctggtgtacggccgtaattccgtgctggaagcactgcgcgtaggcgtaccttcttccacgctgtacatcatgtctcgtattgaacatgacgatcgtactcgcgaaatcgtgaaaatcgctggtatgaacggcctgcacatgctggaggccgatcgtctggagatggatcgtatcgcccgctctggcaaccatcagggcgtgattctgaaggtcgatccgttccagtactcctcgctgaacgagctggccgatcgtgctgagaagaaggccaaggcaatggaggccgcgaattcggcggccgcccgtattgctgcgcgaccgctgtttatcgcattggacggcgtgaccgatccgcagaacctgggtgccgtgattcgttcggcggccgcattcggtgccaatggtgtgattctgccggaacgccgttccgcttcagtgaacgccgccgcttggaaggtgtctgccggtgcggccgcgcatatgccggtggcgcgcgtggtgaacctgactaaggcacttgagggcttgaaggagcgtggatactacgttgtcggccttgacggtggcggcgataagctcgtcggcgagactggctttgaatccgatccgctcgttgtagtgctcggttcggaaggcagcggtttgggccgactggtgcgcgaaacctgcgacgcgattgccggcatcccgatcagctcgtctgttgagtcgctgaacgcttcagtggcggcgggtatcagcctgtacgcggtgtccaacgcacggcgcaaggctgcggcggagtgattgtcgcttgaggccgtaataggttgtacatacacggaagcccctctatttgaggggcttctttgtgtgatgggctcacctacagacagtccaccggattgtccgcttaatgactccacactgccgcatccggatcgtcatcggggttgtagccgtcgtcgtccgggtcgctgtaggtggattcgtcgtcaatgacgccggaatcggcctcttcgttaagttcggcgagtgccttggagtcaaggctgtagctcggcagagcgttgtcgatgtagctggtcacggcctcgcccatcggcacgtcgtggccggccttctccgccaggaaccagcgatggtcaagcacctcatggaagaactgagcaggctcgatctgggagcgatattcgcgcggaatcatacgcacggtcggctcgaacacctcacgcatccagtcggtggccacgatttccagatcctcgccctcacgccacgtggaggcacggtaggcgtcaaggtcgttgagcagacgacgggcctggttctcctgcacgtcaaggccggtgaggcgcagcagcttgcggttggcgtagccggcgtccaccacgcgcgggcggaccagcacacgcttgccgtcctcggcggtcttcatttccagctcgtccacgtcgaagcccagctcgttgagcttgttgacgcgctgctcgatcttccacatttcgtccgggttgaacttgtcggtgtcggtcagggcgctccacagcgagtggtagcggtcgactaggcggttgcccacctcgatctcatccacgtcgccgggcagtagcttgccggacgccaaatccataagttcgccgatgatgttggtgcgggccaagtcgatatcgtattcgcgctggccgtcggtgagctgggcttgcaggtcaccggtctcggcgtccaccaggaaggcggagaaagcgtcggcgtcgcgcaggaacaggacgttcgacagggacacatcgccccagtagaagccggccaggtgcaggcgcaccagcagcacggcgagggcgtcaatcagtcgttcggcggtgtccgggcgcaggttgcgggcgaacaacgcacggtacggcagcgagaacttcaagtgccgggtgaccagaatcgcctccagcggctccccttcacgggtatgacggccgatgaccacggcgatcggggtcacagttggcagttcgagcttctgcagtcgacgcaggatctcgtactctcgctcggccacctggcgcgtgatctccttcatggcgtacacctcgtcgcccacgtgcacgaatcgcacgacgtggcgggagatgcctcgcggcaggttggccagcaggtccttaggccaggtggccaagggcttgtgccagggcagcgtgaacatctttgggttcgagctggcggcggtgattttcagtgcttgcggttcggctgaattggcgtgttcgtcttcggctttgacagacgtggccttcagcgcacgcggatccatctggggcaattcgttcaactccatgtgttcgattttacgtgtcgttcgcgatgtgtgctcctttgccacgacttcggcgcgttatgtttacggacgattcaactcgccccatgccgctcattgcatatcgttggacttggtttgctgtgcaagctgcaaacgcagctcatcgatctgccgctgcaggctctcgatataacgtgtttgcttgcagatgatcagatcgcgcacgtcacgcacatcgaccttgctgacttctctgtcttgctccgtgtccatatccacagaaaacaggcgttccgggctgcttgccacttccagatcttccagctgcattttcttccgccatcggtccatgcagcgttcaatacgtttttcgcctatgagctcaggccctagtcccgcctcacggaacaggtacgtgggcgattcgccggcatcggcgcgcatcacgcattcccgtttgaaccactcggcatacctgatgcgtgatggcgataccttcaccaccgcccgcagcttgatcagacgttttatctgtgcggatgagaacgaggccttgctatgcgtcatgcttttcctccgtcggcacggaactggtgtgatgactcggtatcatcggagcgatatcgcacgcgtagtttcaacacggcaaatgcgatgacaagtatgacggccgcaacaccggcgatacctcccacggcggcaccggtattgccgataacgccaggattgcccggcatctctcctgggttgtgttcgtgttcaggcggggtgggcggagtactggtgctgaatttcggctctaccgtgatgttgagatcggcggccgtatctccgctgccgggaatcgagatgaggaacggatcacagtcgtatgccttgttggctttcgccgaatccgtgcgggagaccagatataggccaagcggtaggttctggaaagtaagttggccagctgcattggtggtgccggaatgctggtatagcttgtttttcgccgcgtgtgcagccagcttcttggcggcatcgtgatattcgctcgatgtcaggcgttcccaatcggcagtgagaccggaaaaatcactgacggttttatatgaggaaacgctaccgttgctgttcgttgtgacggtagcgacgcgcacgatggcgtaggtatcgccggcaagtgatttgggtgaagccgcgtctcggttccacacggcattgatggtgagagtgccgaaggaatcagcttgcgcgtatggcaccatgaagccgaaagacacaagaccagtgaggatgatagtaatggtggcggcaatcatggcagcaatgcgcgccgcaccatactcgcttccgctatgcgggtctaacatgtctgcccggtcctttccgccgtgatgaatgtgattggttatttgtattggctggctgaggaggcaagtcaccgtccggctcgatggctgtggagctagaatcaccggatgcgaccttggcgctcccactctgccggcgtcgccgctcatgccgctgccacaaatgccatgcaataagcaaggcaatcagcgcgagagacggcaacaaatactgcagcggaatgtccacgtggaatgtggatttggcgtcattctgctgctgtggtgtgtatggaatacgatgaccgcgcaccagcagccgatgcgtgttgaccgcatacggtgtgcaggtaatgagcgtgaccaaatccttgccgggctcaatcgccagttgtttggcatcagtcggcagaacggtagtgatcttatcgacctgatacgcatacgtgtctttaagtattgtgatatagaacttgtcgccttttttcataaggttcaagtccgtgaacagttttgccgtgggcaaccctcggtggccagacagcgccgcatgagtggacgcgccaccaactggtagtgaggtctgttccaagtgaccgatgccggattgcagtactttctcggaagtgccgtgataaataggcagggtctccttgagcttaggcacagtgacgtatcccatcatgccgtcgccggcgaggttgaggagcttcatgtactcggcgtcggtggcttcggtgttcaccgctccggtgagggcgctggtggtgccggagctttcctcggcgagtctggtgttgtaggcgtgcgcggcgtcgatcatgctgcggtattcctcgtcggagagtgcctcgacggccgcgtcgtagttgctgacgacgcgcgaggcgttcttcatgacgaggaagttgctgatcgtcgggtagaacaggacgagcagtccgatcacgatgaccagcaacggcgcgaggccgcgcagcttcttaaccatggatctccttggtggggcttccccggtcagggaaggccggcgccccggtccccttgacgcgggtcaggggaaccgggggtcagtggcggtctcaggccgcgtgacgggacttgcggttggacttgacgtaccaggtcgcgccgagggccacgatggccacgccgaacacggtgaacagcacggtgcccatgccgccggtctcggggagggtgacgcccttgttgttctcgacggtgatgaccgggacggtggtgccctgcgcgttggcgttgtttaccttccaggactccaggatgccggtgttctcgtcgtacgtggcggagatggtgaccgtgatcggatccttcagcaggttatagcctgtcggagccttgatctccttcaccttgtaggcgccttccttgagaccggtgaactgcagcttgccgttattgtcggtgaccacagtcttgtcatcggcgacggtttccgttcccttggccgggcggaacacaccatcggagaccttcacaagattgatcttggtgccgttctcgcgctgcagttcgaactgggcgcccttcagcttatcgttgtggtcgaccgcgttgaccttctcgatgtcgaagttgaaggtgtaggtgtaggtcttgtcttccttggtggtgccggtgccgttagaggccgggtcgttgctgtactcgatcttcgcgtcgttctggttgccggtggaaccgacctcggcgtccttgttcagggtggcggagtactcgacggtgatggccttgccggcgtcattctggtgcagattcttgaagttcatcatgttgacttcaagagcggtcttaccagtatcggagtccgtggtgtacgtagcggtgtagtcgaggtccttggtcagcgtggtatcgccgatcttgacggtcggagcgaacgtgccgccctcggcggtgccgttcagagtaaggcccttggacagggtatcggtgaacttgaaagtgtagccgttggtgtactcggtcatgtccggcacggtggaggcgagcttgaagtccacggtgtcgccgatctcgacgctgttgtgcttcttgtcgtcggtgccgttcttgacggtcttctggatggtcgggtaggtgctcttgaggtcctgctcgacggcggtgctgttcagcacattgagcaggatggcatcggtgccacgcttgtcactggtatcggtggaaccggccttcgggctgacgaggtaggaaccgtaggccagatcggtgaacgtcgccgtgtacttaccgtccacggcaatcttggccgcgctctcggtcttaatggtcaggccggtctgggtcttcgcccaatcggaggccttcttggcgaacgggacgacctgggtcttcccgtccttgaggccggagacgtagtcataggccctttgggcgacgttgtcgacggtggtgtcatcgccaaggttgaactcagtcttgttcgagatgaagaactggttccactcggagttcagcgtgaagccgccgttgtcggcggttccggcgttgacggcatccagatcgtaggagaacatctggtaggccttgatttccttgccggcgaactcggcgttggtgctgctcaccttgatgctgccgttggcttcctgagcgttggcggtggtggcgccgaggccggcgatgccgagcatcgtggcggctgcgaggacgcccgccgctacattcctgattagtgacttcatcactgttcctttctctgtactgcaccggtcccggtcggggccggttcgagttggttacattggttgccccgccgccgtgcgacggcgggaagtctggttatcgggtgtgccgaccgcgtttgcggccgaccggcagcgcggttcccgcgcccgctcccccggccgcggccggttccatgcggttggcgcgcaggtaccatgcggtgccgagggcgagcatgagcacgccgagcatgacgaacgggagcgtgccgttgccgccggtctcgggcaggggcgagaagttcgtgacggtggccacgtacttgccgtccttgtccgttccgtacttgacggacaccgagtaaccggcctcggctggggtcttcgtctcagcgttgccatccgtgtcgccggaggcgtaggtcatgttgagctccttgacggtgtacgtgtagtagcgcgtcacgtcctcgccgttcgggccggaacccttatcaacgaaggcgaccggcaggccggtgagcttcgtgcgccacgtgtcgctccacgcggagccgttctccttggcggtcatggtcaccgtgaacgggttggtccgctcctcggtggcgcagtcgtccttgaagcattcgagcttcccggccttgacctgttcgcccgccgcattcgtgtacgtggcggtcacctcgagggtgatggcgtcggggcgttccagctggccgttgcgccacactttctgcagggtgaggtccacggtcttgcagccgtccttgccgcatgggtcctggccgtcgtccggttcgggggtgagtccgccgttgttgtcggatacgggcacgtcaagcatgagcactgccttggctggggactggtaggcatcgagctttgtgctgctgccaccagccacagtcacggcgtccttgatgccgacccatgtggcaccagtgtcgccggatgcaccactgtgcacagcgccgctgtcgtatgtgttgaccacgtcgaacagcttcacttcccagcgatcgagtctggtgtgcagcgcatcgtctgccgtgttcttccgcgagaagatcttgttgccgtcctgtgcggaggtgcgggcctcaccggcgttcgcggccgccttgcggtagatgcggtaggtgttgtatgccttgccgccgttgccgtcatcgaccggtccgaggatgtcgctcatggtgttgaagtcccatacggacttgagtttggtgttcgagaacgggtcgaccagtccgctggtgccgcggatcgtgtcggcgtagaccatgtggtcgtccgccagcacgccctcgtcgttcagtccggcgaagccgcccgcgtagcctgtggaaagatccttcacgccgtcggtgtcctgagtcgctccgccaccgaacacgtcatagccgctggcgatgcccgtcacggtggactgttccacgcgggtgcggttgcccttgatgagttggacggtcaggttgctgcctgacccatccatgtcgatgccgttcttgctgcagggcagtttgatgacgctgtcgccgatggtgacgatcgccacgtcggtctgctgctggttttcggcgtcggccttggacagggcgacgctcaccttcagcccgaacaggttcacgtacagcacattgccttccgagagcaccttgaggtcgaataccttgccgaagatagccgggaaccacttgcccaagtcaataacgccgacctgttccaccttgtcgaggtataggagcttgaccagcgcgttcaccacttgcaggagcagttccacgagtaccgagttgacctgcgtatcgaccagataggcgcggctggtttcgccgacgaatccgccggcgatctcgccgctggtgaccttcttgagattgtcagacgtgcagccctttactcgggccaggtccgcgtagccgacgaatccgcccgcgacctcgcgtccagtggccttgtcggtggctttgccgtaatcgtcgccatggtgtgtggcggtgacggtgtagccgtccggaatgccggtgacatgtgaatcgccaacgtgcgagccccagatgtcaagtacgccggccgtggcaccgagcagattgagcgcatccgtgccgagttgtgcgttgtcggcagcgaccgtgccggatttgccaagatgcccgatgaagccgcccacgtagttcacgccggtcacactgttgaggttggtgaccgcggactgcttgacagagccattgatcagtccaccgccgaagccaccggccgcaccggtgtaacgcttcgagtcaagcatgccctttgtggtggaatcatgggcgacaatctggatgccgtcgctcacgccgttgacctgaccgtcgtagatgaaggtgcggaacgcttcgagcacacccacgttgccgaccttgagcagtttgagcagcaggttggtgttctggtccttgccagcttcgccgccgccgacggaggcgacgctggacacatcggcaaggccgaagaagccgcccgcgtattgtccactttcaacggcgcgcaacccggtgactgtaagcgcggctgagtccttggcagtatccacttcactgccggtgcccttggcggagtccttgtcaccgaggatcgcggcctgcagcgagccggcgaaaccgccggcgttcagggcatacttggttgtggtgttacccttatcgtccttggtctcatatgcgccgttgaccgtgtatccccatgccgggtcatccgagctcacatgcgcaccgcgaatcgtcgtaaccgtggcctgcaatacgctgaccagacttgccgggttcgataccagcgagtcgaggattccttgtaggaatccctcggatgcgttggtgtccacatctgcgaccgcgccggcagtggccacgccgatgaatccgccgacgttgttgcgtccttccaccttgcgcaggttggagacgttggcaccggcagcggtgacaccatcagcaagcttctggccgttctggtcgagatcgccccagatctggccgccgaccgcgagacccacgtagccgccggcgttgccggtgccgtgcgtgatgtcttcgccggcggccgtgattttcatacccttgcggtagccggccacgctcgaggatttgatgacaggcacgaatacctgtgccacgtcgagcatctgacccagatcaagtttgatgcctttgtctccgaatagttggatggagccgaacgaggatgccgagccggattccatcgtgcccgcgtagccgcctgccgcgcgtatggcggagacggtcttgacatccatcgactggccgtcggtgatcgtaccggtgcgcatcaggccgacgtgtccgccggcgacgccggaatcatgcaggttcgcgccggtccgatactccgcacgaccggcgacgacgttgaatccgaagatgtaggattcgaggaacttgtccagggaatcctggtcggtaacagagaccgcaccatcgcccgtagctacctcggtgaattccttgccatacgcaccgtacttgccgatattatcgacccaggtcttccactggtcatagctcatattgcgcagcggaccggtgaccttcgtgtgctcctcagtcggatagaccacggacagcacgccggcgaggttgccggccttgatgagaccgccgagcaaggagagcgaaccaccttcagcggtatcggccgcttccatgaagccggtgtagccgccggcaatttcggcaccgtatacgctgcggatacgcgcggcataggctacgcgttgcggcccgttgtatttgccgtcggtgttctcctgcttccatgctgcggtgttgttgccccagatatggccgccgcggttacgacctgcatagccgccggccatgccgcggcgtgtggttgtatccgatgccgcctgtgcgcgcaccgcgccgccgcacactgcggcatcggttgagctgttgcgaatcgtcggcacgaagtcctgcacgagcgagagcaggttgtcgaggttgacgagcttcttgagcacgctgccgtcgccgagtacgttcgccacggctcccggctgcatggtgcccacgtagccgccggccgatacctggccgatgatgtacacgaactcgtgcgagctggagtcctggatatggccgccttcgatgtctccggcgaagccgccggccatgcccagtgaatcgggcttgttgttggcgttcctatggtctgcggtgctggccagcacggagtatccgccgatgccgccggtcacgtcggagtgctcgatggtcgaaacgacaatgttgagcacatccagcacgtcgttgagattgacgttctggccgagcaggctcaggccgccgcccacggctgctgccgagccgatatccattttgccgatatagccaccggcataccgcgcggcagtgactgcatacgagctgtctttgctcagataggtgtcgtcgattgatccggtggtttccagattcttcggtgccttgacatcggtgtggcgcagttgagtgacactggaatgggacacctgcacaccggaaccgtagccgatgtagccgccggcggaaccggattgcgtatcggattggtcaagtcgggtggcggagacggtgaagccgggatcatccgggtcggaaatcttgttaccgctggtggtctccacggtggtggcatcggaatgcacgcccgcgtaggagatgaacggcacatagccctgcaccacctgcagcagattggcgagatccaccgtaccgaatttgccgagcaggctcaggccgccgttgccagccgaagcgagtgcgccggagacaaccttgccgccgaatccgcccgcgtatgcgccgccggtcacatggtcgaggttgacaacagccacggggttggcttgaacgcgggactgcacgcctgccagcgttgggtcgttctcgagatctttcttatcgaactgattgactttgccgctttggaaattgccggcgtagcctcccgcgatatcaccttcgacgtaaccaccgttgacatacgacacagtggtatccgtatagcttggaatcagatacggcatggcaccgagcaggtcgttcacggacagcagtccgcccttgatgaggttgtccaatacgctggaatcatcggcgttgctaagtgcgtcggcgaggccgccggtggtggagaagcccacgaagccacccgctatgccatcggatgtgctggtatcggccgtgaccgacttgaggttcgtcacatggctttcgcgggtcttggtgctgttggcctggccgtagaagccgcccgcagcgtaatcggtggtctcgttgttctcgttcttgccggtcgccttgaccgtgaatccgttggcgatgccgttcacattcgatgcagtgactgcaaccgaagaatattgggcaaccgatagcagaccggatagcttgataagcccaagcacattaaggccgccggcgccaacggcgtcgcccggtccggagaagccgatgaaaccgccggcttctcccttggccgtgaccgtggccagattagtgaggttggtgttggtcacgtcaccaccggtggcgcatccgatggcaccgcccgcatagtatgagccagccgtcactgtcaagccggatgccggggcagcaacagtcacgttctccacggtgaacggggcaaactggtcgaacttcttgagcgtggcgatatcgccaattttcaccacactgttgagcaacccagccactgtggtcggttgcagattgccggcgatgccgcccgcgtaggagccgccggcgctgactgattcaagaccgttgatggcagtggagcgctgctgagggagcccacggggattgttgtatttccagaacgtgaggttctgcagatgatcctgcgaggagtcgccgatcaccgtgcccgatccttctcccacgagaccgcccgcgtaatcgccaccagccttaacggtgaaggagcccttcatctgcgtgccgagaatcacggagggattcacgccaacgatggacagcagttctcccgcaccactaccgctgccgctcagcagcttggccacagccttggtgagttgtttcagcagcgatgcgttcgtggcatcatccgtgccgagttctaggccccatcccacggaggcaaatccggtgaatcctccggcgtgggatttgtcagtagacacggcagccgtggctgaaatcgtattattgaccgcgtaggcattggccatcgcgccgctaaatccaccggcatagtccgtggcagatacagtgaccttgccatcgccgtcgacggtcaggttgctgttctcgatgaggctctgcggacgcagtgcagacagcaaatcaataccaagcgagttgagcagaccacctacattgccattgcggcttattccggcgaagccaccggcgtattgcgttgcccgcacggtgaaaccgttcgtgctcgtcaccgaggagttctcgatgattgcgccaatctgtgcaccgacgaagccgccggcttgcggattattcttgttgccgatcaccacgttctttttgaacccgttcaccgaactgttcgagatgaccgggttgtagtagccgaccggaatcaaggcattcagtccgagcgtgccggacagcaaccagttcaccaaatcgcccagcccgaggaatgggatgacacccaagatcttcgagagtacattggtgagcgttcccacgatgccggagaccgcatcgtatcgggttgcgccctcaacatatcccacgaaaccaccggtcacacggcttacgctggataccgaaacatccgccacttcacaatccgtgaccttggcatcgccgtaaatacggccggcgaacgcacccgtggcgagattggaaggattgtctttgtgcagggtgagcagaccttgaagattgaggtcaagatttacttgtccgaatgtcagcagtttcaacgccttaagcagaagatccaaaagtccacccactgccgaagtgagtgtgccgagcagtgtcggcggaatatatgacttgcttgcctgattcgtcacagacacgtcctgcagcttgaggttcgacaccacggccgtaccggcgctgcccagactggtgttgttcatcacggtcttgttcgtgatcgaggcgaagaagccgatgccctgctgcttgctgacgtccagctgcttgccctgttgattgacgaccacatggctgatgaccggccgagctgctgtggtatgctccacgcttgcgccatccgcgccgacagccttccacaggctagccacagcgtctgcgctgttggagatcgcgccgagcatggtgccggagaacatgagcggagtccactcagtactggcggtatccgccgcgttcttggacaaatcgatgtcacggaagatcagataattcgcatcggccgaatatgtcagaccagtgttggcggcagagtagtccgcttgcgtaccatcagcacccacgccgtaatacctggtgcgggtcttatcagcgtccactttcgtatgacatatcgccagcgaattgtcatagtcggaggcatcagcattgcgcaaggtatccgaatcggcaagatcggcgtcaccggcgtattcagtggacgacgcgccatctacccagtggtagccaaagagtccttgcccggtgcaggtctgcgtgaccttgttgatacggccaataaccttcttgccggaaccaatcgcacgcagctgctgctcgttgccgatcaggatgtaggtcttgccgttgatctccttggtgacctgaccttcaaagtcacggccgccaagcgccgtcgcggcgacctgcacattggccttcgccggcgattgatccgcctcagtcgaagaatcgttcttggcaccttgagaagaagtatcagtcggagcctgcgtttgggttccgtcattagcggaatcgccagcagcagcccctgctgcggcatccgccttgttgcctgcctcaccatttgaggattcggaagaaccaccggtagtggaagatgaagaagatgaatcttgctggacttcctgattcgtttcagaaggtgctggcgcaccgtttgatgtattggcctcttctgacgtcttatcgtcaacattgacattgcgagcagaaggagcagctacgacagtattatcccccccccgcccccagttagaggaaccatttacatcatctacgtcctgggcatatgccgcaggcaccatgcacacgatggacaaggaaacagcaacaaccgaagcaaggcagcgccgcaagacatggcgatgctgtccaggttcctgttctacccctccgttaaacctgcaacggccgagctttaacttcgagcccatcatctcccctcatagattcgcaatccccttttcggggggatactgcatacaaccatacccccttcctaggaaaaagttgacgagaaactagaaaatgttcatttgcgaggtcagttagcgtacgttttctaggcaaaagaaaagccccgcagctatgcagggcttttccaacgaggtcataagagaggaagagaataacctcgtttaatggttgacgaagcgattagacctcgccaagtatctattagttcagacgcagctcagtcgacggagcgaacaggtgcatcttggccgggtcgatcttgatcttgacggtcgcgccaaccttcggcagcgcacgcggattcacacgaatcgtggtgagcttgttctggtcggacatgacctgggaagcctcagcggcggagccatcggtgatgatgttgccgtagatgtagccatcggagcccagatcctcgacgttcacaaccttcagggagaaggcgttcgggtcgtcagccggggccaggccagcgtcctcaggacggaagccgaccacgatctggccgttgtcttcggcggtgagcttgttgacggcctcagccggcaggtccacggtgtcctcaccgatcttcgccttgccgttgaccaccgggtgggtgttcaggttcatcgacggggagccgatgaagccggcgacgaagacgttggccgggcgatcgtacagctcggtcggggcgccgacctgctgcaggataccgagcttgatgacggcgatgcgatcgcccatcgtcagggcctcggtttgatcgtgggtcacgtacagggtggtgacacccagctggcgctgcagggcagcaatctgggtacgggtctggacacggagcttggcgtccaagttggacagcggctcatccatgaggaagaccttcggctcacggacgattgcacggcccatggccacacgctgacgctgaccaccggacagagccttcggcttgcggtcgaggtactcggtcaggtcgaggatctcagcggccttctcgacgcgcttgcggatctcgtccttcggagtgccggcgatcttcagggcgaagcccatgttgtcggcaacggtcatgtgcgggtacagagcgtagttctggaacaccattgcgatgtcgcggtccttcggctgcatcgtggtgacatccttgccaccgatgaggatgcggcccttgttgacctcttccaggccggcgagcatacgaagggtcgtagacttaccacagccagaagggccgacgaggacgaggaactcgccatccttgatatcaagattcagatcatccacggagggcttatcgttgcccgggtagatacgagtgacgtggtcgaaaacgacttctgccataattactaatcctttcagaggcaggtacgtgcctcacgatccgttgtaaagggatttgttctttactgtgcttccgccctcgccaccgacgtacaactttgctttcggaaactgcaagcttcagcgtttacttttttccggttcagtgaaggttctcttcgttgagccgagaactactatacacggaccgtggaccaaggcaagtggcgtgtctgaaatgtagttaactttatgggcgtttctgggggtgttgtgtggttcggcccatgacacgcctgtttctcgaacgtgcgaaccggcacgcccgacgtagagcaggtctgctcttcccggactgatggattccatcagtcgccgactaatgcgacacagactcgaaggtgacgccgttgcgggcggctttgcgctcggccttgcgctcctcggcgtcttcgatgcgctggatgcgcagctggcgccagtcctcgcgcatgtcgcggaaacggtcggccagcgttacgtcatcgttctcggcatcgccatcagtactgctgccatcggccttaccgaacgtgccatcggccaccttggcgatgcccagcttgagcagtccgagcaactcacgcaacgtttccggtacgggctcatcgccctcatcggcggacttggtcaggccctcgatgcggcgacgaagcgcgtcggcgtcctcgggatcgatcttgagcccggcgatcagcgactggcgcatggtctcgtaatcgaggttggcaaaaaaattcagctgttgcagcgtcatgaagcccttgagctcggggaatcggtggacgatgtattcctcgcggtcgtcggcggcgcgggtccagtcgcgggtgagctgcggatcccagctggcggtaatcgacccctcgcgcatgcggtagtggtacagcgccttgggcagacggaccacgcgcgtggcctcgccgatcacgttgcagatacgggagagatcctcgattttgcgacccaccgggaaggagaatccggtgccctgataggtggaggcgggtgccaggaaggcccagaaatagccgtcaatctcagccttgacttgctttttgatgacctcgaccggggtcaggacctgcacctcggtgaagtcgttgtggcgatagttggacagcagcggcttgttgttctcggagatggtgtcgaactggaacatcacgaggtcggcgtcatactcgcgcatggcgttcaggcagtcctccaccaacgtgggtgccacggtgtcgtcggaatcggcgaagtatatgtacgcgccgatagcctcagcgataccggagttgcgggcgtcggacaggccgccgttgggcttgtgaatcacgcgtatgcgcgggtcgcgggcggcccaggcgtcgcacatggccgggcaattgtcgggcgagccgtcgtcgaccagcagaatctccagattggcgtacgtctgcgcggcaacagacgccacgcattcgtcgaggaacttctcgaccttatataccgggatgatgatgctgaccaacggctcctgttccatatctccagcgtagcgccgccgtgcgaacgcggcggcgctgcgggttcgcggaccgcgaaacccttagaagtcccagtcgtcgtcatcggtttcttcggctttgcccatcacgtaggaggagccggagccggagaagaagtcgtggttttcgtcggcgttcgggctcagggcggccaggatcgcggggttcacatcgcaaatctcagccgggaacaaagccgggtaaccgaggttcatcagcgccttgttgccgttgtagcgcaggaacttctcgacgtcatcggtcaggcccacgcgatcgtacagcgactgggtgtactccacctcgttgtcgtacagctcgttgagcaggtcgtacgtgtagtcctgcagatccaggcgctcggcatcgctcagctgggcgatgcccttctggtacttgtagccgatgtagtagccgtggacggcctcatcgcggataatcagacgaatcacgtcggcggtgttcgtcagcttggcgtgcgcggagaagtacatcggcagatagaagccggagtagaagaggaacgattcgagcagagtggaggccaccttgcgcttgtacgggttgtcgccctcgtagtagtcgagcacgatttccgcctttttctgcagaaactcgttgttctcgctccagtcgaaggccgcgtcgatctgttcggtggagcacagggtggagaagatggacgagtagcttttggcgtgcacggattccatgaaggcgatgttggtgtacacggcctcctcgtgcggggtgagcgcgtccggaatcagggagacggcgccgaccgtaccctggatggtgtcaagcagggtcaggccggtgaacacgtgcatggtgagcgtgtgctcgccctcggtcatcttctgccagctggggatgtcgttagagacggggactttttcgggcagccagaagttgccggtcaggcggtcccagacctcaaggtctttctcatcttcgaggcggttccagttgattgcggagacgcggtcgatgagtttcagcggtttgcgcggaatggagataggtgccatgagtagtgttccttttactcgttgtcgttatcgtcgttggatttgttttcgaactcctccggcgcggtcagccggagcagtgctctatagacggttcgtgacattgttggttccttagatggtggagcccccctcagtccgcttcgcggccagctcccctctctgaggggagctgtcggcgttagccgagtgaggggagtaacaacggctctctggttgttcgatgtgtgcggagaccgccgtctgaggccgaaggcgtacgaaggtacgtcgagtgccgaagaaaggcggtatacgctccatcgaacgatcagagcatgcagctgacgcagccttggacctcagtgccttccagggcttgctggcggatgcggatgtagtagagggttttgatgcctttgcgccaagcgtagatctgagccttgttgaggtcgcgggtggtggcggtgtccgggaagaacagcgtcagcgacagtccctgatccacgtgctgggtggcctcggcgtacgtgtcgacgatggccttccagccaatctcgtaggcgtccttgtagtactcaaggttgtcgttggtcatgtaggcggccgggtagtacacgcgcccgatcttgccttccttgcgaatctcgatcttggaggcgatcgggtgaatcgagctcgtggaatggttgatgtacgagatcgagccggtgggcggcacagcctgcaggttctggttgtaaatgccatccttcaggatcgcgtcgcgcagggcctcccaatcggccgcagtcggaatcgcgatgccgtactgctcgaacagcgcacggacccgttcggtgcgcggggtgagcgaacgacgaccatcggtgtacttgtcgaagtagttgccctggccggccggcttggcgtagtcgctcgtagcgaagctggcgaacgcgcggccatgctccacggcaagcgcgtacgaggcgcggtaggcgtggtaggccacggtcatgaagtacatgtcggtgaagtcgaggccctcttcagaaccgtactggatgccttcgcgggccaggaagccgtgcaggttcatctggccgagaccgatggcgtggccctcctcattggcgcggcgaatcgaaggcaccgcgttgatgctggtgtgctcggccaccgaggtgagtgcgcggatcgccgtctccaccgtgtggcccaagccgccatccatcgtcttagcgatgttgagcgaacccagattgcaggagatgtcgcggccgacatgcgcatacgtgaggtcctcgttgtatgcgctcggctcctgaacctgcaggatttccgagcacaggttggacatggtcacgcgaccttcgatcgggttcgcgcggttgaccgtgtcctcgaacacgatgtacgggtagccggattcgaactgcagttcggcgatggtggtgaagaacttacgggcgtcgatgtaggtcttcttgatgcggtcgtcggccaccatctcgtcataatgctcggtaacggagatgtcggcgaacggcttgccgtacacgcgctccacgtcgtacgggctgaacagggccatctgggccttctgtttggccagttcgaacgtgatgtccggaatcaccacgccaagagccagcgacttgatgcggatcttctcgtccgcgttctctcgcttggtatccaggaagcgcaggatatcagggtggtgggcgttgaggtacaccgcgcccgcgccctgacgtgcgccgagctggttggcataggagaaggagtcctccagcagcttcatgaccggaatcacgccgctggactggttctcgatgtgcttgatcggggcgccgagctcgcgcaggttgctcagcagcagggccacgccaccgccgcgcttggagagctggagggccgcgttgatgccgcgcgaaatcgactccatgttgtcttcgatgcgcaccaggaagcagctgaccggttcgccacgctgggccttgccgaggttcaggaaggtcggggtggcgggctggaagcggccggcaagcatttcgtcggcgtattcgatggcctgctgctcattgccggcggcgagctccagggccacagcggcgcaacgctgcgggaagtcctcaagatagaggcgaccatcgaacgtcttgagcgcgtaggacgtgtagaacttgaacgcaccaaggaaagtgccgaactcaaagccggcggattccacgtgctcgtagatgcggtcgaggaattcagcggagtactggttgaagaccgcagggttgtagtactggttgctgatcaggtattcgagacgctcggcggtggaggcgaaccgcttgctgttggtggccacgtgccctgtcacgtattcgcgttcggcggccttgtctttgtcgaactggatcttgccgtcggcgtcatagaggttgagcatcgcgttgagcgcgtggtaatcgtgcgccgggtcgtactgttccgctgcggtgtcggcagtattgtcgagcggcaggccggtggcggtgaggtcagtcattggaaatccttggaatatggcagaagtgtgtttactcagacagttgctcccctcagtcaacttcgttgacagctcccctcggagaggggagccaatacctcgagggggtcaagatttactgttccgtgaagaagcggacgaggccgtttcgcacggcggcagtgtcttccggggtgcccatgagttcgtaacggtagaggtagggcaccttgcatttggcggcgatgatgtctccggcggcacagtaggcctcaccgaaattggtgttgcctgaggcgatgacgccgcgaatccactcgcggttggctggatcgttgaggaagcgtttgacctgaatcggcactgctttcttgaccacgccgccgccataggtgggcaccatgatgacgtacggttcgcggacgtttagcgccggggcggcggcccgcaacgggatgcggtagacgttgatgccttcgtcctgcaaacggcatccggccacgaaccgtgcggtgttttcggaggccgacgagaagtagaccaatgcgccgatcgtcttgccttcggccgcgaattcgggctggctcagactcacgcggacaccgtggcggcggcgcggttgtcggcggccacctgctgggcgacttcgcgaatcaggtcggggcggtagccggtccaggagttgtccggcgtgatgaccaccggagcctgctggaaaccggcggcctgcagctgctcaagggtggaggggttctgcgtcaggtccacggtttcaaacggcacacccagcttggtgagctggcgcttggtggcatcgcactgcgggcaatgcggcttggtgaacacggtgacggtcatggcgactccccttgatgtggttctgatgaacagtgaagcgaaggccatattacagcggtgtgatttgaaatcaaggcactatatgtagtggcgcgtgtcacataacaaacctagatatagggtttttcgttgatattccgccattcccatgcacccccgaaaatcggcgtgcagcgacccgcccaatcacatgtggcattgttcacatttgcgtttgaaccgctcttcgactgatcctcaaccgccctgcaaccgccatcttgagtttcgaggggctgttttgaccctttccggagatctatctccgtttcgaggggctggtactcaagtaagcgcatccccaaaatggcggaatgacggtggggcgaagccgtttatacccgtgttctagcgggccaccagcccctcgaaacgggagtaaacctctacggaaggccaaatcagcccctcgaagcggagaacggatacctcggcaccccgtgtggagccagaaggcccggccggatgtccaaacgagcatccggccgggccttaaaagtagttgttcagttatcagaatcgatgcggcgcgatactactccgcgtctttacggctccaacagatcttcgatgcggcagccaagcgtgcgggccaaagcgagcacggtggagacggcagctttgccaaggtctttgcggcgctgctcgtacatttggatggagcgcagggtaacgccggagcggcgggccagcccggattggctgagtccggcgcgcacgcggatcgtgtgcagccgggagtcgccctcggtgcgattatgggcggcccgctcgtcgtacacgtcgacgaatcggctttcgtcggcttcgtgcagagtcgggtgcagtcgcacgatatcgtcgagcgacagcacatcgagaatgtccgagaaccgcactcccctggcccattggcagtatgcgagtacccatccggcccagtattcgggtgttgagccggcgcgcagtgcggctggcggcatatcgagaatgcgcgcccaaccggtttgccgcatgatttcggccaccagctcctcgccggacatgccacacacgtatttgggcgtgcctcgcccgaaaagcgcggccgcctcggaggtggcgaagaagtccatgaataggccgaccggcaacccgcaatcgttcagcgcataatcgaaggcgccggccaagttggccatggcgtccggcaagtatgtctcatcataggcggggatcatcgttggtcactttctcgcggatgatgtcgcgcatgaacaggccgtcgagatcggcttctgcacttttgcggcggtaggcttcgcgagctgtgcggtcgcgctcgttacgcaatccgtggtaggtcgaagcgcgggcgatttcgcagccttggaaccgcagtgccgcgaatgcctgaggactggcgagtacgatctgcttgccgagctcgcccaaccgcatcgcctcagcgagttggtcgatggaaatcgcgttattgacaaaagcgcgggcgaacgagaaatacgaatcgtcggcacgatatccgacgatgacgtcagcctgactggcatccggcagaaacacttgtttcagatattcgatgccttgcgcggcgacggcggtggtcggctggaaacgacggttttcgaccagcatggccagccagttcaggatggtgtagggcggctgggacaggtccaggaagaggagcccgtccgtggtcaacgtgtaccgattcgcgaaaccgtcatccagtcccgcgcacgcccattccttggccagctcgacgctgcgcgtgcaatagaatccgcggccataatcgttgttcggcttgaccagcccgtattcaggatgcttgatgacatgcgaagagccatgccacagttcgatcgatgcggtctccattggccggctccttctctctctccttacatattcttgattatatcactgtggtgatagtcataagggaaatgcgagatgaaagataccgttgtatacgttcgtacacaacgtgaaatgtatacgaacgtatacaacactgacgtccggagtcatgctccgcagtggcgcagcgggcgcgccactacaatcggaatatgggactgaagacgtggaagaagtggacggactggccgctgatggtgctgtccgtggtgtttctggtggtgtattcgtgggaaattctctcccgcacgcatatcgcgctgtgtgaaaccgtcatcaacgtgatctgggtggtgttcgtcgtcgattatgtggtctcgctgtggttggccgacgatcgctggcggtggttcaagcacaacctgttcacgctgctgaccatcgcgctgccgatgctccggcccttgcgactgttgcgtttgctgaccgtgctgcacgtgctgaaccgcacctccggcatggcggtgcgcgggcgcatcaccgtatacgcggtcggcgcggtgggaatgctcatgtacgtgggcgcgctggccgtgtattccgtggagcgcggggcgtccggatccacgatcaccgacttcggcacggcgttgtggtgggcgttcgtgaccgtgaccaccgtgggatatggcgacttctcgccggtcaccttccaaggcaagatcattgcggtggtgctgatgttcaccggcatcgcgttgatcggtattgtgacggccacgctggcctcgtggatcgtggatcaggtcaatctggagacggatcggcgcgaggacgctcgggagaaggaagtggccaaggaagccgcgcaagaggctattgcaacatcagccaatcccgaaatcgacctattgcgcgaggaagtgcgtgagctgaccgctacggtagccggtctgcgcaccgaacttgagcgacgttgattggcgaagcgggacaaacaacgattctgccaagaaggtccgcgtcagttgttgtcaccgcggattgcggcagaatcattgtcgccacggctgttttcttcagtcggctcaacccaacttttgataatttttatttttttgatatttttgataatttttattttaggttgattcagcgaggaggcggtccacatgaaggcaaaggaaaacccattcaagccaacggcaggaggggaaccgcccctgctcatcggccgaggcaaagttatccgcgatttcgagaaaggtctcgataacggagtcggtgccccagggcgcattatgctcgtcaccggcgctcgtggaaccggaaaaaccgtgatgctcactgtgttcggagaccgggccaaagcgcgcagatgggatgtcatcgaagaaacggcctctgccggactatgcgaacgccttgttgatgccttacgaaccgggcgaggggcccttgaccacctcactatccgaccatcgttgacttttgctggagcgggcatcggcctcggagaagccgaactatccccgaagcgtatgcccgaaacgttgagaagtgccattgccggacggttggatgcgcttgagaagcgccatgctgggttgcttatcaccattgatgagactcaagcggctgagcgatccgacatgattgccatcgccactgccatacagcatcaaatcagggaacgacgcaatatcgccatcgtgttcgccggtctcccacagatgatttctgatttgttcaatgacgaagtcatcacgttcctacgtcgcgcgaaaacgaacatactcacagatattcctcttgatgaagtgcgcgatgctttcgccacaacattccgcgcctccggcatgtccatcaccgacgctcaattaagcactgcagccaatgtgacagccggatacccctatatgattcaactggttggctaccatatctgggatgccgcagacatgcgggactcggataccatcatcgacgctgatgttacggcaggtatcgaggaagcacgtattgaccttgataacgccgtgtgcatcccggagttgcaaggcttatccaaaaacgaccgtgagtatctcgaagccatggcagcgtcagatggtccctctcccaccgtgaatgttgcacagcgcatgggcaaaacgcctaactatgccgccacctaccgcaaacgcctccttgacgccttcgttatccgcgaaacagaacgaggcgaagtcgattttgccgtgcccttcctgcgcgaatacttgcgtcggaatcagtaatcggcacaatgcacagtatcgatatattccgttccatataatgacttttcgcattcagatacacaatggacggcctgttgagtagcactcagcaggccgtccattctatttagctattcagttatcggagacacacctcaggccttgaccggagcgtcagcgggagccgatgccgccgcggccagtttgcggcgcttgaggtacttcatgatggtcaggaccatgccgcggaagccccactcgccacgcaggacagtgttgagcagtccggagtgggaaccgccccactccataccgatgtagttgaaggcgctcatcacggcacccgcgccgccctgcttgacgctcatctcgaagggcttcaggtagatctcgcgaatcgactgctcgttggcccaggtggcgagctcgctcagtcggttggtctcctggtcgttcagcgcgaagtgcttcatgaaggcgtacacgcccttggcctgagcgccagcgacctgctgggaggccatcacgccgaacaggtagccgtcttcggagaagtattcgaaggtacgaccggcgaagtcgcggcattcgaatctgatatcgttatcgattcgatcagcggctcacgatactgcccttgcatcgctgtgccactgttgaatgtgcccggctggctcacctttgggtcaccgccgacacatccttgatgccgatggttatagagtcgcaaattcacgactggcgcacctgcccacgcacctatcctgtcatttcgagcgcataatttgctaccacatccggtcagggcaatcgaccttaatggcgtaaacggcacttctcaatacgtaaacggcacttattcttggctcccctctcagagaggggagccaagaaatatcaagctcggcctcccaggagagagccagaataatgcaccagcaaggcattaggatggagggcatgagcgatttgaacgcgttgaatcttgagcccggcgaagtggttggtgggtatacgctgatctcccggctcggctcaggagctatggggtcggtgtggcgggtgcgcgacgacggcggcaccacctatgccatgaagattctgcgcgactctctgaccgacgagtcagtggcaggctccggctctgcgtccacggccctgcacgaccccgacctcaagcccgatgtcacgccgcgcgagcgcctgcggcgcgaggccatggccttgaagaagatcaatcatccgggtgtgtgcggcatcgtggatatggaactcgacgatacgttggcgttcatcgtcactgaactcatcgagggcaagaatcttaaggatgatgtggccgccaatggccggtatgtgggcgacgatctggaacgcttggcccgcaagctcatcgaagccaccaaagccgtacatgcggccggcatcgtccatcgcgacatcaaacccaccaatgtgatggtgtcggccgccggaccggtattggtcgatttcggtatcgcgatgggcgagggcgaaagtcacgtgacccgcaccggcctagtgatgggtacacccggattcatcgcacccgagattattgacggtgccgaatccgacgacgccaccgattggtggtcggtggcgtccgtgctcgcttttgccgcaaccggcgcgcctgtgttcggcaccaagccgatgatggcggtacttgagcgcgaggcctcgggcaacgcgaatctttccggactaccggccggcacattggctgccttccgttctgcactggacccggatcgcagggatcgttgcacgccggatcaattgctgaatgccatcgccttggatgcgttgaatcccaacgcttggcagggcgagcaggcgggaccgttcgccgcgggagccgtggctggacaaccggctgcgatcgttgccgaagccgcggaggcgatgcccccttttggcgcggccggcggcgttgaccgcaataatccccgaaccatctggcgcgcggccgaggaagccgctgaggctcccaccatggccgtgttctccggcaataagggcgataacggcgatggcgaaaccgccgtattctcgccggctggcgccgctaccgccacgctgcccttagccgatatgccgccacgtccgccggccggtgcggagcaggccacgcaactgttgcccgacgctgctgccgatttcaccgacgacgccggcacacaggtactcaccggcgcgaccacaccgatgccggaccaaaccacgccgctggccgagcgcaccaccgtactccccacgccgcagccgtcatcattccccccgtccggcaccgcccagagcagctgggatcccgcaagcaaccagcccacagcggtggaccccgccattcgcccggcattgcagcgcatcatcgaccaaaccgcccaagcggcccccaccgaaaccatggtccaaaatcctcccatgcccaatccggtggacgtgaagcgaggggaatatctgcagcgcggcaccctgccattgatcctgctggcggcgccgctggcggcactggcggcaaatgctccgctcgtggccatcatcgcggccactgcgttgttgtggctactgctcaccctggcctataacaccgaaccccagcttgagcgcgagggcaaacgcggcggcgagcgcaaaaactccgattcgtggattcgcgtggcgacttttccctggcatctggtcaaagccctgctgctggccattccccgcatactgctgctagtcatcatctatatggcgggaaccgccgtggccaccgcggctctggcactgcccgttcacaccatctcctggtatttcaccgcggattggggtattccggtgccgttgctcaatgatgtgccgttctccgcttccgggctggcgctgggcggtttcatggccatcggctggctggtcactgtgttcgccccacagtcgatgatgattcggctggggggcggcgtactgcgcgggctcaaacacagtcgcccggcgggcgcgccatccaccgaagtgggtggggctccacctgctccagtggcgccggcgcccaagggcggcgggcgcggcaccgtgctgttcaccatatgggccatcatcaccgtggccttgtgcgcgatgccgattctgggcatgccgatcaactggatgccgttcgcctagagcggggcggaatctcacacatcagccatccgcacacatggccgttgtgtatccgatacgttcgttccgtcacacttttacagggaattcacctcagatcagctctgggcgcagtcctcctcaggcccggtcattatgatggggcccaaacattgaagcgattgcaaggggatagctatgtcagatccgaagcgtcaggccaagcgtgccacacgcgctgagcgccgagcggccgaggaggccgcacaacaggcacgggccgagcaggcagccaaggagcgtaagcagcagaccatcatcggctgcattgtggtggccattattgtggtgctggtggccatcgctggattcgccgtatacaaggctatgcggccgtccaacaccagcagcagtagccagcaaagcaacatgaccgtggacgaggcctatagcaagctcaagaaagtcagtacccagccggctaacgccgacgacaaggccggcttcgtaatctccaacaaagggtatggccagaaagccgagggggctcccaccgtatccatctacatggaaccgctgtgccccggctgcgcctcggtgaaccgccaactcgacccgacgctcgtcaagctgatgaacgcaggccagctcaacatcgatttgcacttcctcaatttccagaacaacaagagctccgacaactactccaaccgcgtgttcaacggtgccatctacattgccgagcatgatgacgatcccgaccacctcatgagctacctctccaacatctacgctgaggatttccagccgggcgaattgtccaattacgagccggtaaacaacgccaagctggagaagcaggccgtcaaggccggcgtgagcgaggatgtggccgccgcggcgttcagcggcaagaacgaatacctcgactggctcaccgcctccaacaactacacgatcctgcgccccgaactgttcaacagctccggcgccttctcctcccccacactcaccatcaacggcgaatactgggatctgaagcagctcacgctggcggacacgaatatggtggacggcttcctcaagtccattgggctggatgctgaccaggtaggcgtggaaggcaaaatgccatccatcggtgccagcggaaagccgatttcggtcgcctcctgatgctgcgtggccgaataagttgacgccgcgacatatgcaataccgcctgcggctcggcttaaattgaccactcgggaagtaccggtatactagtcatttgttcgcaacgatttacgcgttaagaacaatcgcctctttagctcagatggccagagcggccgccttgtaagcggcaggtcgtcggttcgatcccgacaagaggctcgtcgcgcagaaaaaatggcgtattatgtgatacgtagacttttctacgcatataattcttaccttgggtaagtactccaggagccttcccccaattatgggcttcctggaatgagggcggagcgtcccccaaccagctccgcgccttcaaggggggcgggaacatccccttctctcccgccccccttttcttttctttttttgagctcagaacaatctgacgagcaggaatggtgacggtggccggtgaaaccgcagtacgggccggaacaaccgttacgatgggtggcgtaatcgttcatccagcaggaagagtatggcaatggcacggcgttggaccccgcagcggtttgttacactgcgtcgcatccgcgtaatcgcctgtatcgcggcgaccagtatcgcgctggctggatcattcgcgttcaccgcgcgtaaatccgtagccctgaacatcaacgggcaaaccacccaagtcaccacatatgcgatgacggccacccgtcttctggaggaacaaggggtggatatcaagacccacgatatcgtcactacctcgtccggcgaccaactcgccaatcatgccgtggtcaccgtacagtccgcctaccagaccactatcaacatcgacggcacgtccgttcccttctggaccgtggccaccagtgccgaccagttgctgggatttttcgaggaaaaccagaacaacgccacaaaaatcaccgtcgacatcgacaatgtgtacaaccagctcaccggcggactggtcatcaatcaggatggcccggtcaccgtcattgcggacggcaagacttccgtggcccccaacggcaaactgcccgcggcctccattcttgactccaaaggcatcgtgctgaacaaagaggaccgtgtgagcgtcgaaaaggacggcgataccactatcctgcgcgtacggcgcgtgacgcatggcgaggaaacgcgcacagccgtagtgccatactccacacaaaccatcatcgactccaatcttcctgaaggccagtcggagatccgccagcaaggcgtcaatggcgagaaaacccaggtgtataacgtcacgtatgtcgatggcgtggccgaatcggagacgctgaaatccgaaaccgtcaccacgatggccatcgaccagatcatcgccgtaggcgccgccaagtctgataccgataaaggttccgacaaaaaatccgactccgccgataacggcaaggccgattccggttccaacaatcagcacgagtcgtccggtaacaatgccaacaacacaggcgacaagaacaacagcagctctggcaacaacacgaacaccgataccaacaacaatgccggcaacaccggcggcaacaactccggcaacaccggcaattccggtaacactggcaacaccggtaacaccggcaactccggcaacactggcaacaccggcggcggtacgaacaacaattccggctcttccggctccgattcaggaacaaccaccacgccctccggccgactctggcacgccaccgtagcccaggctcaggcctatgccgccggtgccgccgcgcagcgcgggtggacaggcaacgactgggattgtctggtcaaactatggacccgcgagtccagttggctgtggtatgccgaaaacgcgagctccggtgcctacggcattcctcagtcgctaccagcagacaaaatggctgcgttcggtgccaattaccgtgacgatgccgccgtacagatcgattggggtctgtggtacatcgcacaagcctacggcagcccgtccaaggcatggcaacattccgaacaagtcggttggtactgatcggttacgaagcccacaaggaacacacgcttatgaacgacaccattcccgccactggtcacctgttaggtgccgccgatatccgtcgtatcgcggccgatgccggcatcagccccaccaagaaattcgggcagaacttcgtcatcgaccccggcacggtccgtcgtatcgtacgcgaggcgggagtgaccgctgccgatcatgtcatggaagtcggccccggcctgggatcgttgacgctggcgattttggaaaccggcgccaccatgaccgcagtcgaaatcgatccgccgctggccgaacgactgccgggcacagtcgccgaattcatgcccgaagccacgtcacgactcaccgtcgtcaatcgggatgccttaaccgtcaccccggagaacgtgcctgatttcagcgatgacgcatcgtttacgctggtcgccaatctgccgtacaacgtggccacgccgattctgctcacgctgttggagcgtttcgacaacctcggctcgttcttggtgatggtgcaaaaagaggtggccgacagactcgccgccaagcccggttccaagatctacggcacgccgagcgtgaagctcgcctggtatggcaccgccgaacgggtgggcaccatcggccgcaatgtgttctggccggctcccaatgtggattccgcgctcgtcaaattcacccggtatcaggccgatgacccggctgccccgggaactgcgaacagcacagacgacggcacacaacgggaactcgtatttcgtctgatcgatgcggcattcggtcagcgtcgcaagaccctgcacgcggcattgaagaccattgcgccctccgaggcattctccatcgccggcatcgatccgacccgtcgaggagagacgctcaccatcgccgaattcaccgctctggccaaggccatcgaatcgtgtggagatggagatgaggcacaatgagtccggtaatctcacatccacgctcagccgctgcccgacatcagtccgatgagctctcccccatcaccattacggtggattgcccggcgaaaaccaatctcaccttggaagtgggacctgctcacgacgaatggggcggacgccacgaactggacaccatctactgcgcaatcggcgtatacgacaccgtcaccgcaaccgccaagcaacccggagcaggattctctctggagctcgaaggcgcttatttgggcgacttggcctcctcacgcagcgacatgcgccgcaaccatgcggtactggccctcttcgccatggcccaggcggccgagcgcgagccggatgtggcgttgaccatcaccaagcgcattcccgtgggtgccggactaggcggcggttcagccgacgccgcggcgaccatgctggcggtcaatcgtctctgggagctgaactggcccatagagcgcctgcgcaccattgctgccacgttgggcgcggacatgccgttctgcctgaccggtggccttgcatacggcaccggtttcggcgaacgcatcacggatatcgcccccggcagccgcgatgagctggcgctgatagaacagggattcagcggcgaagtattggtcggcgcataccagtcgcaactcagcactcctgaggtctaccacacctttgacatcgtgggagccgcagaaggcgaccgcaatcatctgcaggctgcggcaatcagcctgcatccccgcagcgggcaggccatcgacgccgccacgcaggcgggtgccagccatgcattcgtctccggatccggcccctcagtggtcgctttcgccgccgacgaggcagcggcacaacgcattatcgaggtgtggcgcgatacagctgtggtcgatcgtattattcgagccaaatctcccgaacaccccaatatcagcgtcagacagtgacgctaaggtagcaaccagccacccgacccatgaaagaagtccaccgatgacgtatcaggttgatgaacgtgaagcccgcaaggcgtacgtgcgccgccgccagaccatcgtcttttccatcagcggcgcggtattggcagtagtgctggtcatagccctactgttcaatttccacgttttcggcctcggcgaagtggagactccggccagccagccgaattacggcaacgcggcgccgtgcgcggtcaaggacagcagcggcaaagcgcaatacgtgtccaacgcttcggtcggcattcgcgtgatgaacggcacctctcacggccaattcgccaaggccgtgggtgaagctttggccaatcgtggattcagcgtgcagaaaatcgataactattccagcaccgacgttgaacgcaccatcatctacttcggcaagaacgccattaatcaggcgtatacgctgatcggcaatttcaccgacgccaccatgatcatgacggctcgcgaggatcagctcatcgatgtggtcatcggcgccacgttcaacgatctgcaggacaccaactcctccccgcaatccggtaagaccatcaccaatatcgagggttgcaaggccgccgatagcatgaccaagctgcccgccgacaccaaacacgacgcatacacggcgcagtaaggcgcatacagcttcatcttcgcgaaaaaccgtacgctgacacgtattcagcgtacggttttttggtatcggactagtatcggactactgaatctcggcgtaccagcacttgagttcttcgacggccacatcgtggtccaccggaccgttatccaagcggtattccagcatgtgcttgtaggcgcggccgatcatcgggccgggctccaggcccagcaactccataatttcgttgccgtccagatccgggcggatcgcgtcgaagtcctctttcttcttgagttcgcggacgcgctcctccatctcatccatggcctgggagaagatcatcgccttgcgtttgttttgtgtggtggcatccgcacgcgtgagcctgttcagccgctcatagaggtgcccggcatccttgacataccggcgtacggccgaatcggtccacggctcgtccacatagccgtggaagcgcaggtgcatattcaccagttccgagacgtcctcgaccagatggtggtcaaaacgcagcgccttcaaacgcttgcgggtcattttggcacccaccgcgtcatggtggtggaagctcaccttgccgcccgactcgaaccggcgggtcttcggcttgccgatatcgtgcatcacggcggccaagcgcagcgtcaggtcgggggcgggcaccgggccgtccgggccggtttccagggcgatagcacgttcgagcacaatcatcgtgtgctcgaagacgtccttgtggcggtggtgttcgtcgatctgcaattgcagggccggaatttccgggaagacgatgtccgcaagaccggattcgaccaacgcctcaaggccggcgcgcggacggtcggagagcagcagtttggtcagttcgtcgcgcacacgctcggcggatacgatgtcgatgcggtcgcgcatcgaggtaatcgcctcggccgcgtccggcgcgatacggaagcccagctgggccacgaatcgcacggcgcgcatcatacgcaacggatcgtcgtcaaaggactgtcgcgggtccaccggcgtgcgcaacacgcccttggacagatcactggcaccaccgaacgggtccacgaattgcaggtcaggcacgcgcagggccatcgcgttgacggtgaagtcgcggcgggacaggtcgccctcaagcgtgtcgccataattgacctcgggcttacgcgagtccggatcgtacgtgtcggagcgataggtggtgacctccaccttgacctcggtgccgtccgggcggcggcgcatggcacccagcgtgccgaacttgcgccccatgtcccagaagccgtcatgcccccaccggcgcagtatcggctcgaactgctcaggccgtgcggatgagcagaagtccaaatcgtggctctttctatggagcagcaaatccctgaccgggccgccgaccaatgccagctcgtaaccctgttcggcgaacagtcgaccaagttcgatggcttcaggccatacttcgaaatccaatgggcaccttcccgcgtgcgacgtttttctgccctaccagcataccgttaccccacctgcacacggggttgagtaaggtggagaatatgattacgcccgccgaccttgcccgcatgctggggcaaacaccagattcggcggatagccatacccaagaccacctgctgtatacgtccgaaactccgcatcattccgccgattcgggcgattcttccgatgtcggcggcaccgcgagccactccaccaatcaggccgttcatcaagacgaagtagacgcagtaccgactgcgcaacattccggtgtacccggcacacccgcaacgcccgccacacccgcaccatccgaatccgaaatatcggacgccgccagcgacatgcccgcaccgaagccgatgatgcccacaccggccaccgtcttcggcatgcatgccaccgtcaccatcgccactaccagcggcactatcgaggggcaggctgatggtatcgccggcgaggccggtgccgagacgattgccgaggtcgagccgattatcgccacggcacaaacgtccgtaaccatcgtcacgaacgatcccgcggcgaccgctcacgcggccgtagatgctgccgttgcggtcgccaaggccgccgccgcgcacaccacagcgataccgactccgcgcgacgtgctgatgccgcctgcggcacgtaccgcaccggccgcaacgccggtcaccatgccggtctcagcgccgtctgcagcaccagtgaggcccgcaacgtcagcgcatcccacgccggccacggtcttcggccggcacccgtccggagatgttgcctcgccggaaccggcagtgccggtagaaccggtgacaccatccggcccgactccggccatgatgccgcagcgccgtacgtcggacggtccgaccacattcgcttcactggatgcccaggaactgccggtcgtacgcgaatattcggcaggcggtctgattttcgatgaccagaaccgcgtggccattatcgcccgtcattcccgctccggccatctcgaatggtgcttgccgaaggggcatatcgaaaaaggcgagaccccgcagcagaccgctgtgcgcgaagtgcatgaagagaccggcatcctgggcgaggtgatcgattccatcgccaccatcgactactggttcaccggtaccacgcagcgcgtgcataagctggtccatcacttcgcgctcaaacagaccggcggcgaattgacggtggaaggagacccggatcatgaggcggaagacgccatctgggtgcgttttgaagatttggatggcgtgttgagctatcccaacgaacgcaaaatcgcgtggctctacgccaggaagaagaacaggcaggcaaacgagtgaacctacccggagtcttacgacattgcacacgtctggcacacgcactggcggctggcgtcgccgttgtggcgatgctggccgctccattgaccgtctacgcgaacgatacgacggacacgactgattcatccgatacgacggacgcaacgggcaatcagaccgagaatcagcccaagcagagcattgccatcacgcaaagcacccccatcgtcacctccaaatcgggctatcgtgtcaccgcggtcatcagcaatacggacagcacggccacgtcaagcggcacactgcacctgaccaccaatgcgttgttcacctttgtctcgcgcaccgatattcagaattgggccgagaacaacgcccccatcccaacccccaacgagttgggttccgttgacgtgccatcgattcccgccggcggcactgccaccgtcaccatcgaggtgaacgccaatcagcagacccttgcctccatagggagttggggaccgaaaccgctgatgctgtcgtatatcgttggcaatcagatactcgccgatttgccgagttttctgacccgatcttcggatgggctcaacaccgcgacaacaccggccatgaacctgaccgtggccatgccctacaccgccagcggctggcaggtcgataataaggccatcagcaatcgcattgccgaaaccaccacttcctcgacatcaacatcgtccaagtccaacagcacggacaaggccgacaagtccgataacgccgacgccagcaacgcggccaaagccactgatacgcaagccatatccttatccgaacaggatgccgataccgcgcgatcccttgggcagacattcgccaagcaccgctcgctgcaagtgatcgcggatcctctgtattggcgtcagtccgcagtgcaaccgtccattgccggcatcatgcagcccgccgacttcgacatcaccgcctataccgcactggacgataccgcggcctacgaaaaggccggcatcaccactgagcagtggaacgccaagcaggcggccgcatggtatgccgacggaggcgactccgaaacaccctccgcgtacgcatggcagggcaacaactgttggacgttggatgcgctgaccgcagcacgcgagcagggctatgacacggtgattgccggtgcctctttcgatgccgaccagactgaagccgtacacacaggcacctacgtggtgcatacgcctgccggcgatgtcaccgtgctgaaggagcaatcgaccttgggcacgctggccaagggccaagccaccagcacggacgcgcaggccgagtccagcgatgccggtcggttggcccgactgatcgctcagagcgcgttctaccagatggaacagccctatacatcccgatacctgcttatgacgttctcccgcaccacggaggccagctggatcgatcaggtgatgagcgccttcgagcaggcgtcttggttgaatctgacggacctgaagaccatggccaaggccgatccgtacaatgtcagcgattcggtcaatcccgacaaggccgatgatgccaacaccgccaatacccggtcggcattgagacagttggccgacagccggcatgacatcatgcgcatggccacctccatattgaggaacgagattgattccgacgaggtctcgtcgttggacccgcaggccctggcccggcaggacgccaatgacaccgcctcgcatagcaacgatccgacgcaatggattggctctttactggtgctgcatgacgatatggcgctgcggtccatgtctggctccccccagccgacagccacgcgaaaagccatggtcaaagccacgaaaacactggccagcgatcttctgaacggcgtacgcatcaacccatcggaatcaatatccgtgttcagcgaatccgcgaaaatgccaatcaccgtcagcaatgaccttccctacgccgtcagcgtgcaggtcaactcactgactgactccatgcagatcgtcacctcgcgaaccgctgacatcgatattccctcgcatagcgacgctcaggtgaccttcaccatccgcgtttccacttccggctcatcgacggcccatgtgtcgttgaccgaccgggaaggcaacagcttcggcaacacgcaggacaccgcgatcaccagtatgatgcgcatcagtgatgccagcggcttcattatcatcggcttcgccgtgctactgggcattatcggcctgtggcggcagttccatcggaagaaggaccccgacgaatgagttcaagcgtaggtcgtaattccctgatcatggccacgggaaccgctgcttcccgtgtgaccggtcagctccgcacgattcttctcgctgcggccatcggcaccaccggattggcggccaacgcctatcaggccggttccatgattccccaatccgtgttcacgctggtgtccggcggcatcttcaacgccgtgctggtgccccagatcgtgcgcacgttgaaagaaaaagacgcccaagaacgactgaatcgcctgattacgttggccatcggcatcctattggccatgaccgtggtgatggcggcggccagccctctgcttgcccgcctgtacgtgggtagcgacgatcaccagatgatagccctgaccacctcgttcaccctgtggtgcatgcctcaggtgttcttctacggcctgtatacggtattgggtcagatcctggccgccaaagaccatttcctcacgtatgcgtggagctcaaccggtgccaacattattagttgcgccggttttactggctttattctgctgttcagcaaggccaatgaacagcccctcgaattctggaccgccgacaaaatcgcgcttaccgcaggcacctggactttgggcgtggccttccaagcgctgatactgttcctgccgctggcccgtatcgggttcaagtacaaacccagcttcgggcttggcggctttggactcaggtctatgggtcccgtggcgttaggctctttgggcgtggtgatcaccagtgagatctgcggcattatccttacccgtatcgccacatccgcaccgcagcgcgcccacgaactgacgggtgccagcctgttcagcgtggcaggcaacgcgacctatcagaatgcgtacacactgttcatcctgccctattcactcatcgccgtatcggtatccacggctatgttccccaaaatctcccgttccatcgcagctgcgaatctggatgaggcacggcacgacctggtcagcgcactgaataatgtgggcctgctcatcatgttcttcgccgccgccatggtcgtgttccccgaaccgatcatccgtgcattgcttccgtccgtctcgatggacgagactatgttgatctcctatgcgcttatcgccttgtctatgggcattccattggggtcggcgttcctgctgatccagcgcacgttctacgcctttgaggacggccttcaccccttcctatccgcggtgatgcagtatgggttcacctcggtattcatgatcatcggcatgatggtacttcctcctgagcattgggtactcggcatcgcctgctcggtgacactcggcggattactggcgttgccgctgacgttgatgatgttgcgccgcaagttcgaaggcaatcttggcggtcgggagatcacgaggacatatgccaaggccattgtggcggcgctggcttccggagttgtggtctggctgatcaaacgaccggtagtcgcactgttcgacgcggatattcgaccagtaggcgggcacatgagctggtggtctgcgctggccatctgcgtggtgctcaccatcgtgctggccgtagtatatgtggctgtgttgtgggtgatacgcaccccggaactcatcagcgcctatcactcgatactggcccgtctacacaagactccggccagtgaggacgttgctgtgacagcccagccggaaaaagtcgacgatacgcaaatcaatcctgagacggagcccgtcaaggatagccccacacgtagaatatctaagaccagtctcgaacaccaatcacacggagccgaacgcactatgaaaccgcaactcggagacacgattctcaaccgatacaccttggtatcgtcgttgcgtgaggagcctggcattcaggcatggaaagccaacgaccgtgtgttggcaaaggattgccagctgttcatcattaccaatcgcagcgctttcgccgcaatcgatgagctcgctggtcgcatcgccgccactcgccctgattgtgtgattcccgtactgaaataccgtatggaatccgacgtacttctcattgtcatgccggtggacagcggccaatgcctgactgactacatggtagataccgacaagccgctcagctacagcgccatccggtcgattatcggagaatgcgccaacgtgctgcgcgaggtcattgcggatactcccagcggcatcgtcatcacaaccgacaccgttcgagtgactacctccggtgtgcaaattgccgatgcaccatgtgccacgatgctggccgatacgtccgctaccgatctgcgtacggacggtcctgaacggtatgcgattcgccagcttgcggcattactctataccctgctgacacgcacgccaagccaagcgacacccacattcaatctgcgtgccttgccgcaagacacccctggcgaattccgcgtgatttgcaagcgtggattggccttgagcgagcccgacgatcatacgttgccaatggctgcccttgtagaactcgacgccttgttgggtaattggaagccgctctctgaactgagcgatgctgatatcgctttgccgagcgtggaaagcgattgctcgattaccaaggcgatactgaagcccgccaacgagaccgatatcgtgcctattcccagcacgttgattaacagcagcagtcttccggaattgtctattaccccttccctgccggttcagccggccgccgtccccgctccgcacgcgatgtcaccggctcctctgcctgatgggtccagtactgctgacggcaaccagtctcaatctgacgcccgccgtctgtttgacttcaacctttctgacgcctgggagcacgagaatctttccggtgaagacaccggtgactggtacagcgaaatgaatccggcccccatcggcggtccgggtgataatactcggttgacggtgcctattgttaccggcggtatttccgatgccaccgtgggagagacgaccagtcgtattcccgtgttcgatgtcagcggccgtgctgtggcccccggtgaggaatcgctgcgtgccttggaagaggagcaggcccgcattgccgaagtaagcgccattcctccgagcttcacaccgaaggatgtgccggatgacgaggatgacagcaagctgcccgatgaacatctgttcggcaaactgtcgaccaaggtcgttgccatcattgtggctctgatattggtagtggcagcggctgtttgggcagtgcatgcgttccgatcctccggagacaatcctgccgatgcttccagcaactccagtgaaggtgactggcccgatatcaatgctgacgctgtgccattcggtggcagcaagaacgcgacgaacggtggcgccactgacgattcctcaaagtcgagtgatgccactcagagcgaatccagggactcagcatcagacaagtccaagaagtccgagactgctgattcgtcgtccaagaagaccaaggccaagaagtccggcgataaggattccagcgctgctccgcaaccgcgccatgagaacaacacggcgtttacgatttccagcgccaacttcctgtcgaatcctggcggccaatccgggtacgcatactacatgcaccttgaccagccgcaggatgcgtaccgcatggttatcaccatccgcacatccggtggtaagggctatattcgcgcaaataccactggagaccccactcagggcgagcaggtggccgaattcacctttgctgaaggtggcactactgaggtgaagttcaccaaagccgtcaatacgcaggatctgctgctgtgggtgccatcgggtagcctgccgcagaaccagctgtacatcgagaaggtggaggtcttctaatcggcatctataccgataactgacccaagaaggggcggtaccgttcgcatacattcgacggtgccgccctttcttcgcgtctggctgaatgacatggaatatcgtatgggggtgtgacaatgtttcacgtgaaacataacgtcatcattatcggttctggtcccgctggctacacggccgccatctatcttggccgtgcaggtcttaatcctgttatggtcactggtgcgttgtcgccaggtggacagttggtcaacaccactgaggtggagaacttccccggattcccggaaggtattcttggcccggatcttatggatcgcatgaaggaacaggccaagcgcttcggtacaacctatatcacaaacgatgtctcttccattgaggcgtgtgagagtgattcggtcaagccgacctatcgtgtaacgctctccgatgactcccagttggaggcatcagcactcatcatcgccacagggtcgtcattccgtaagcttggggtgcccggcgaacaggagctgtccggacatggcgtctcgtactgcgccacctgcgatggcttcttcttcaggaacaagcctatcgtggtcgtaggcggtggcgattcggcttttgaagaggcattattcctgacccggttcggttcttcggtcaccttgattcaccgacgcgatagcttccgtgcctcgcagatcatggtggaccgagccaaagccaatccgaccatcaccctactgaccaacacagtggtgacctccattaccggcacctcctcccccacacagaacaccggtgcacctattgccattcctggcttgacaatcaaacgaccggctgtggcaccggccagtgtcagcagcattgccgtacgtaacgtggtgaccggagaagaaagcacgctggacaccaacgccgtattcgtggctatcggccatacgccagccactgattttgcagctggtgttgtggaccgtgacaatgatgggtatgtcgtggtgcagggtgccagcacggtgaccagtgcgccaggcatctttgctgcaggcgattgcgtggatcgtacttatcgtcaggcaatcagcgcagcgggcatgggctgccgtgcagcgctggatgcgcaggcctatcttacggactgattgcggcgacctgatgatggcttgctgttctgactgctgcctgtgacataggagcagcgctaggtcagtgttacagcatgccgcctttggatagtacgcaccggtcaaaggcatagaaagacccctcaggcgacggagaggttgtgcccgatgttttgcgcaaatgtggcctggtccgtcgtcgggggaatgacttcagtcggttgattgcatgatgccgtcgagccgggacatgtccaggtagcggcggctcgaccaatcgttggcggtgacgtagcggatcctggcgcagatgagcatgagcgcgctcctgccatccgggaagctgccgacgacgcgggtgcggcggcggatctcccggttcaatcgttcgatcatgttgttcgtgcggatccgccgccggtgctccgggggatactcgtcgagcagataggtcgtggtctcgccgataccttccctcaggcaggaggccgccgctttcagtctcctggactccatctcgcgggcgacctcctcggccttggcgagggcggacgcgcgtgattccatggcgaagatcgccttgagcgcggcggacgcccattcgcggtgggtgggcggcaccttggagagcacgttgcgcatgaagtggaccatgcaccgctggtatctggcctgcggcagcatctcgccgacggtggcgacgagcccggcgcacctgtcgccgaccacgagcctgacgcccttcaggccgcgctcgatcatggaccgtatgaactgctcccagctggccttgtcctccttcatgccctcggccacgccgatgacctcccggtggcccgtgtcgtccacgccgatggcgaccagcacgctcacgttctcgaccgacccgccccatgagcgcttgtgccacacaccgtccatgaacacgtacgggtactcgcccccaagcggccggttgcgccattcgtcgatctggtcgtacaccttcctgagcttgtcggagagcgtctgcgagggcatccgctcgccccacagcaggcggctgatgtcgtcgacctgacgcgtgctgacgccggccaggtacatgtcaatcagcgcctcctcgacgctctgctcgcgacgccggtagcgttcgatgaccgccgactcgaagaccgcgcccttcagcttgggcaccttgagtccgagcctgccggccttgacggtgaacctgcgcgcgtagtggccggcccggtacgccttgcgtccatcgcttctctcgtatctggcggcgttggcgattaggtcggcctcctcgtcgagcatcgcgttgacgatctgctcgaccttgtcgcgcaccatggcgtcgagcttggtctcgaacatggcctggtcgaactgtatgatttccttggacatggcccgtgcctctttccaatcgcggttttcctgtgttagcgactgaaaatcgtacccggtgcgggccatgctcatatccgggaagcccgaatcacaaagtgcgcaaaaactgggcgttatctctcgtcgcccgcgacagcttcaccccgcaagactgaaaacaaaaactcgagatacagcaaggaccggcatcctgttacgaagccggtcctgcaattacgtttcagcaatcgcgccttaacgaagaaggtgggcgtcgcaccagacgtgttcgacggcccagatggcggggttgatcagaagcacgtcggcagcgtagccgggggcaagcagaccgagcggctgcttggtgaccgggttcgcacgatcgaaaccgaatgctttggccggaatcaacgtggcggcttccaccgcgtcggtaggcgtgaatcctaattcgagtaccgcacgctgaacagccttttccaacgtcaacgtggaaccggctatcgcaccattcgatgcaagacgaacatgaccgtcaatcacattcacatccaacgcacccagcaaataatgaccatccgggcaatcggtggcagccatagcgtcggtcacaaacgcaatgcgatgcggagcgaagccgaatcccaaacgcaccatcggatcctgcacatgaaaaccatcattaatcaactcaacagtgacgcgcggatcctcaacagcagccggaatcggaccaggctcacgatgatgcaaaccattcatcgcattgaacatgtgcgtcataatgccagcacccgaatcaaaacctctgcaggcggttgcataatcggcatcgcaatgtcccaccgcaggaaccactccagccgcagcaaaacgacgaatcgcatcaatgccatgcggcagttcgggggcgatggtgatctgccgcaaacagccgttcgcagcatgcaaaagccgatcaacatattcaggaaccggatctttcaagcattccggatcatgcgcacctttgcgagacaacgcaaggaacggaccttccaaatgcgctccaagaatgtcagggcgagcacccatcatgccacgcacggtttgaagattggcgcacatcacgtcaagcgggttggtgatcaaactgagcacctgacgggtggtgccgtgcatcatatgacctgcgcgagccatgcgtatgccttgcacaccatcatcgaaggaactcccccacgaaccgtgcgcatgaatgtcgacgtaaccgggagtcatcatgcggcctgcagcgttggtcacgaaaccggccgaaccggtcatggaatcgccgaaaccaaccgaactgaccgaatcggaatcagcatcggcatccaaaccgacgcttgcgcatgccgcagcaaaatcatcgtcccgattcccagtcgcaataatcgcgctaccatcggaaaccagccaataatgttccgcaacacctcgcgcatcgactttgcgcgcattgtgaatcgcaaacggacgggccgactgcgctaacgcaacgtccacctcattcgcaaaccgctcccgagactgttccatattcaaaccttccgactcactcacagccatattcctcaattagcatccaattcttccagcgagtggaggaatcctcccgctgacaggccaaaaacgtccagaatgttccagcagttcgttcggcacggaggtttgcgcgtatacgcgacccaggaagaagccgaatggcgaaacgcaacacgggatgatgaatacgatggcgaacagtatgccgaatggtgccatgaacgcccatcctgttcgatcctcgcggcgttgcgcttcagtgcgctttttgccatagaagagcctacgtaccatctacgtagccataacgtctcggaaccactttcggcgcggaaagtctcacgacccatatgacaattgaacgtcaaacaacaacatgacgcttatccgcagcacggaacaacgaaaaacctctcaccagaatcatgcgaggctgcaccttttaagatttgccgttaagttagtagctaagtaaattagatggccctgcaccagccagtgttctccagttcacatttgacggacatcgacttccccattaagagacgccactctgggagatagacacgcccctgacattgacttcatgtccacactcaaccagggtaaggtcgagcgtgaacatgaagtcagcttgagtcgattagagctgaatcacgactccctcccaacgagcaagctcgccgcgagcgatcgatttcacgccatgtacggcatcataggtgctgagcagtatctgcgattccgcgacgccatcgccgagcagctccgccacttctcccggcaggccggcggatctatcggtgaggttgacgacaacaagaatcgtatcgtcgccgctggtacgggtgaaggcatacacctgctcgtcatcggcagcaagcagattccactcgcccgtcgcgacggtcgcattgtcgtggcgcatggcgatgagcttcttgtagaagccgtacacggactccggatcgtcgaactcctcggcggcgttgatctccacgtgattcggattcacgccgatccacggttccgtcgccgcgtccgccggggtgaagccggcgtacctggaagagtcccactgcatgggagtgcgcgaattgtcccgcccgataagcgcgagggccgccatcatcgattccggcgactggcacctggcctcctccacgcgctggcggtaggcgttgatggcctccaagtcgcggtactggccgagctcggtgaaatgggcgttggtcatgcccagctcctcgccctcgtaaatgtacggggtacctcggtgcatatgcagcagcatgccgaacgccttggcgctcaactcgcgcgactcacggtcagagtcgttaccccaacgggagacgacacgcggctggtcgtggttgcagaagaacaggctggcccagccagcgttcctcacggcctcctgctgtctgctcattctatcttgaagttttttaggaacaaaagcgtgtgtatcccattttgattcgggggattgatcgatactgacgtggtcgaacaggaacagcatgtcgagttccttgtgggccggattggtgatgaactcgttacgttccggagtgatgcccggcgcctcgccgacgttcatgtagccctcacggccctcgaacacctcacggcgcatttcggcgaggaactcgtcgagccgcggaccatcggaacagaacgggctcgcgttcgtgtatccctcttcgcctatctctccttcggacaattccgagccgacctctccaggcagccgtccgtggctatcgagatgtttcgagatcaaggtgatcacgtccatgcggaagccgtcgatgccacggtccatccaccaattcatcatcctgtacacggccttgcgaacctccggattctcccagttgagatccggctgcttcctggagaactggtggaggtagtactcgccacgcttcggatcgtactgccaagcggaaccaccgaaatacgacccccaccggttcggctcggcacccggagtgcccggctcgtggcccggcctggccggacgccaccaataccagtcggcgtgagggtcgtccccgtcgcgggaggcctggaaccaggcatgctcgtcggacgtgtggttgaccaccagatccatcacgatcttcagaccgcgcctgtgcgcctcggcgagcagctcgtccatgtcctccaacgtgccgaacagcgggtcgatgtcctggtagtcggagatgtcgtagccgttgtcgtcctgcggcgacctgtagaccggggacagccacagcacgtccacgccaagatcagccaaataatcaagacggctggtgatgcccttcaggtcgccgatgccgtcgccgttcgtgtcctggaaggaacgcgggtagatctggtagaccaccgcgttggcccaccacgggttcggggtcgcgccgttggaacgcacggcgtcgggaaggacggaacgattgaaatcagtcatatcttgtttccttattaaatcaagttcttcatcaacgcgatgctatggatccacgttgcctatatacgggatgaatcaatgttgctttttcttttccctttagagttccatccatgagtcgaacaagcatgctcatgcccagttgacacaactctgctggcattaagggaaattcatctatcctcagacgcttgcctatggaatctgtatatgttcccgctgaaatcagcgaaagatcttgaggaatcttcattccacgctgccgcgtcgcagcaacaaggttattaaggaacaatgggccgccttgagtcacaattgctgtgttctcactcgagatgaacctctcaagtaggttttcggcagcatcgaaattatcctcgtcggtaaactcttcatctatatgaatcttgtatcgcgcagcagcatcatgcattgatgccctgagtcgaatgaggtaatttgcacctccatttcgttcgtaatcaatctccttcccccctgcaaacagaattctgctgtgcccattacgacaaagcgtttgcatgatcatttcacccatttcaataaaatcggtatcaatgcatggcacatttatttcattcataggatgtccaatagaaatgagcggaatacttgaaagctgagctaattcaattcggggatcattcatagtcacatccataagagcgacaccatccaccatcccagtatcgatgatagagcgaagctgctcatctcctgtttcctcagtcaacagcaacgtttcatagccaagttgcctggccgctttgagaaaatttagaaaataagcacaatagttggtatagctggtggaatcatggacgggcgaactcagcgcgacgaaatgagtctcaccactcaacggagctggaccaccgtttttcgccaagtaaccaagttcccgcgcagcttgcaatactctccgacgggtatttgcccctatgggacgtttccctgtcatcacataggaaaccgtgcttatggaaactcctgcgagagccgccacgtccttgattccagccattgttatccttattcgttcacagtaaagccttggctctttccttgctcaacgagcttgtcctgccaagccttcacaccttccttcattgtggtctgtcccgtgtaagccgccccaacagtgtcggtgaaaacgcttcgcgcataaacgtcatagggcagaaattcgaacttagatgtgacacgcttcgcagcctcggcgaattcagcattgaacttctcaccgccaaaataatccaccgtgtctccatcggagttcaccatagtagtctggctaaggaatttatcgttagacatggtcttcaaatcagcaggaaaaccaccttggtccacacgggacatgatggcatcagaattagtgctggcaaattccataaacttgtacgcagcatccgcattcttggatgacgacatcagggcaagggaggagccgccgttctcagaacttaccttctcgccggcgttccacgttggcatttgagcaattcgccactttccagcaccctccggagcattgtttaaaaacatgccgggagcccatgcagcagatatcacgctcgcaaattctccggaaccaactgaacgataccaatcatcagaactatcttttgtcttcgtttcgattagtccttcatcaatcatcttttgccagaagtcacagaatttctgcactcctttatcagtagtgagtttgacggtaaccttggtgccgtctttagatgtggaatatgggtgtccacctgcttgccagaccattgcattgaagaatccggcgttccctggatcattagtaatatatgaaccaatctgcttaatcttctttgcatcttgatagaactcatcccaagtacttggcggctcagaaatgccagctttgtcaaatacctctttgtcatagtaaaaagccattggtccagagtcgactggcataccatacataccgccattgaaattcactgcattccaagtacctggggtatagaaatccttatatttggcagtcccatagtcattcagatttttaagagagcccttaattacatactcaggaatcgcaaaatattcaatcatggctatatccggaattccactgccagcttccaaagcattattcagagctttgtattcatctttactactaccggcattggtaaatttgatgacaatgttagggtttttcttcatgaaaaccttagcattagctttaagattgttatcccaagcccaaacattaacaaccgtcttaccgctcccatcgggagtttccgactgagttgttccacacgctgccaatggaacaaccatcgccgcagcaccgcagagagcaattatttttcctaacgagaacctcattgtttccctttctttctattgagcagcagtggcatgatccttgcttttggcgcccttgcttgtagtctgcatcttaaaaccgaaggattatgactgacaaataatttcgatgatttcgacgatttcaataatcaaggcacttaccataacagacacgcgcggctgcatcacgcaacggccaacacaattgatgatccattgtctaaagaacgagaaagtcacattagcgaatatagtgctgtcccaaggaatgtgccgcgtctaaaagcacatacatcgtcatatgatcggacacttcaacgctttactaagaagtcaacacaggccggaaaaacctatgacgtaaatcaacagcgatgtcgccaataacagctcagctatatatttccatcaacaaattgcctggaatatgtgccaaattgcaacccggcggttcagctatcatgcgctgaaccatcaacttcgtaggccctcacacgatacagtcgcgcgcgcctgttctggtgagtgccttgattattgaaatcgtcgaaatcatcgaaattatttgtcagtcataatccttcggttttaagatgcagactacaggcaagggcgccaaaagcaaggatcatgccactgccgttcaatagaaagaaaggaaaaagaataccatcaggtgtcctcgaaggcatgaaccgtaccgcccgatcatcgaaatctgaatttcttcagtccaacgatcagggtgcgattcatcaaggctccaccgtggagtgaaagtacaggcgcgaaagggatgctttcccatccacacctgtttcacactcggaaatctttgcgcggcaatcaaaaacaatcaaaaaatgtctcgaaggagagaatgatgtcagcaacggaagttgttgccaatatgccactgcattcggcaaccgtgcgtgtcaataaacacaaggcggattggcgtggttggaagtttatgtggccgttcgcgttggtgttcgtgttcgtgttcgtgatcccgatcctgtacgcggtctacatcagcttcttccagaagcagatgatcggcggcacgaagttcgtgggaatcaacaattacattcgtctgttccatgatccgcagttctggagttcggtatggcgcgtggccctgttcactatggtgcaggttcccatcatgctgttcctgtcggcggcgatggctttggctttggattcgatgaagctgcacggtgcgaagttcttccgcatcaccacgttcctgccgtacgcggtgccggcggtggtgtcgacgttgatctggggtttcgtgtatggcgcgaagtacggcctggtgggttcgttgaacgatttcctgggcacggacatcgacgtgctcgcccccagcgtgttgttggccagtatcgggaacatcgtgacgtgggagttcacgggctacaacatgctcatcttctacagctcgctgtcgaccatcccgcattccctgtacgaggcggccagcatcgacggcgcgtcggagtggcagatcgtgaagagcatcaagcttcccgaattgcgcggcagcctggctatcacggtgatcttcagcatcatcggctcgttccagttgttcaacgagccgagcattttgcagaacatggttcctggtaatgcgatcacgacgtattacacgccgaacatgtacgcgtacaacctgagcttcagcggcaaccagtcgaactacgcggccgcgttggcgatcgtgatggccgtgatcaccatggccatcgcctacatcgtccagctcaacagcctcaaggagcagatgaagtgacgacgactactgctgttcgtgttgaggaatcgatgatgatcgtgaaggagcgtatgtgatgagtgcagcaacgacttcggccgccggtcgcctgaccgacggcgagctcaaggcccgggagaaggccgccaggaaggcggagaaggcccgccagaagaggatcgccgccgacgaggccgccgaacgcaagcgcagcgcgaaggccgggttcgcgaacgtgaacaacccgaggcgttccacgttgttgaccgtcctgtgcgcggtcttcgccgtgtactgcctgttcccgttcgtctaccttttgatcaacgcgacgaagacgcaggccgacttcaccagtacgttcggcctgggcttcggcaagacgttcgccctgttcgacaacatcgcgacggtgttctcctatcaggacggcatcttcgggcgctggctgttcaacacgatcctgtacgtggtggtcggcgccggcggcgcgaccctgctggcgatcatgggcggctacgctctggccaagttccgcttcccggggcgcaaagcggtgttcgtggtcatcatcggcgcgatcagcgtgccgggcatcgcgttggcggttccccagttcctcctgttcgccaaattgggcctgacgaacaccccgtgggccatgatcatcccgtcgctgatcagcccgttcggtttgtatctgatgtggatcttctccgagcaggcggttccgacggaattgcttgaagccgcacgagttgatggagcttcggagttccgcacgttcttccaggtgtccctgccgctgttggctccgggcatcgttacgacggccctgttcacgatcgtggcgacgtggaacaactacttcctgccgttgatcatgctgaaggattcgaactggtatccgctcacgatcggtttgaaccagtggaaggatcaggcgagcaccgctggcggccaggcgatccagaacctggtgatcacgggctcgttgatcacgatcatcccgctggtcatcgcgttcctatgcctgcagaagtactggcagtccggcctctccgcgggcgcggtcaaggaataatcaatttctacaccacagccatggaacgaaaagtatggcccgtgctacaagtacgggccatacgcatatacatgatctggcggaccttcctcacaaatcacgatagttgttccccattgtgagacgcacttcggctgcaaagctgaagtaattcagatccatatggccgaaggtacggtctggttgtgcccgaagtcttgcgcgaaagcggtctggcccgttgccgggtcggtttcagtcggttgtctgcatggtgtcaccgagtcgggacatgttcaggtagcggcggctcgaccaatcgttggcggtgacgtatcggatcctggcgcagacgagcatgagcgcgctcctgccgtcggggaagctgccgacgaccctggtacgccggcggatctccctgttgaggcgttcgatcatgttgttcgtgcggatccgccgacggtgctcgacggggtagtcgtcgagcaggtaggtggtcgactcgcctatgccctccctgaggcaggatgcggcggccttcaatccgcgggattccatctgcgcggccacatcctccgccttcctcaacgcggcgtcgcgggattccatggcgaacacggccttgagcgcgccggccgcccatgccgcgtgtttgcggctgaccctggagagcacgttgcgcatgaagtggaccgtgcaccgctggtatctcgcgtccggcagcatcgagttcaccgtggccaccagcccggcgcaccggtcgcccaccacgagccgcacgcccctgagaccgcgttcgatcaggctcctgacgaactgctcccagctggccctgtcctccttcatgccctccgcgaccccgacgacctcccgatggcccgtgtcgtccacgccgatcgcgaccagcacgctcacgttctcgaccgacccgccccacgtgcgcttgtgccacacgccgtccacgaacaggtacgggtacgaacgctccaacggcctgttgcgccattcgtcgatctgcgcgtacacccccttgagcttgtccgagagcgtctgcgagggcatccgctcgccccacagcaggcggctgatgtcgtcgacctgacgggtcgaaacgccggccaggtacatgtcgatcagcgcctcctcgacgctctgctcacgacgcctgtatcgttcgatcaccgccgactcgaacagcgcgcccttgagcttcgggaccctgagggtcacggtcccggccttcacggtcaggtcacgctcgtaatgacccgctctgtaggccttcctgtccccggtgcgctcgtagcgggcggcgcccgtgatctcgtccgcctccgcgtccagcattcgcgttggtagtgcccgagtttttgcgcactttggtcttcgcccgtccccgtggcgatgatcagttcgctgactgtacgttctcaccgagccttgacatgtcgaggtagcgtcgcgtcgaccactcgctggaagttacgtagcggactctcgcgcagatgagcatcaacgcgctgcgcccgtccgggaagctgccgaccacgcgcgtgcgccggcggatctcgcggttcagccgttcgatcatgttgttcgttcggatgcggcggcgatgctcgcgggggtagtcgtcgagcaggtaggtcgtggtctcgccgatgccctccctgaggcatttggcggcctccctcagtttccgcgcctccatgtccttggcgacggattccgccttctccagcgccttgtccctcgattccatggagaatatggccttcagcgcgtcggcggcccagtccctgtttttggggttgaccttggcgaggatgttgcgttcgaagtggaccatgcaccgctggtagcgggcgccgggcagcaattcgttcacagccgccaccagtccggcgcaccggtcgcccgtcaccagcctcacgcccttgaggccgcgcgcgagcatgcctttgatgaattcgcgccagctttccgagtcctccttcatgccctcggccaccgaaagcacctcgcgccgcccgtccataccgacgccgacggccaccaggatgctcacgttctccacggacccgccccagcaccttttgtgccacacgccgtccatgaacaggtacgggtaatcctgttcgaggggcctgccacgccattcgtcgatgtcggcgtataccttcttgagcttgtcgctcagggtctgcgagggcatgcggtcgccccacagcagctggctgacatcgtcgacctgccgggtggagacgccggccaaatacatgtcgatcagcgcctcctcgacgctctcctcgcgccgacggtatcgttcgatcaccgccgactcgaacaccgcccctttcagtttcggcaccttgagactcatcttgccggccttgacggtcaggtcgcgctcgtagtggccggcccggtaggccttccgctccccgctgcgctcgtagcgcgcggcgccggtgatctcgtcggcctccgcgtcgagcatcgcgttcagggtctcctcgacgcttttgcggaccatccggtccagggtggtctccaacatggcctggtcgacctgtagaatctgctgtgacatggcttcgtgccctcgtttccaatcgcggtttgttttgtttggcgacagaaaatcgtacacaggacacgggccatgtctctatctcaggccctcaaccaatttgcgcaaaatctcgggcgttatcatcgcgttcagcaattgctcgaccttctccgacaccaaccggtcgagtctcgtctcgagcatgttctcatcgacctgtagaatctgatcctgcatggttccgtcgcctctttccatagcggttttgtttggcgactgaaatcgtacccagacgacgggccatgcctcttcattcaggcttcaaccaaagtgcgcaacaaaccgggcgttatcgacggagaatcacgatgtgtgatttgtcatcctccagcctgaggggttttctattgcgacaggggctacaacgcaggcatacgcccctgccaggaatcacgcagaggctataacgtcttgcgcgtacaacgcactgcacagcaataatgccggcgacaacacgaatgttcttatcgtgttacacccatttggaatcggcatcgccttggctcggcaccagcagctgcaggatgcgatccatatcctctggtgacgaaaagacgatttcgatgcgaccatgcttggtgctgcccttaatcgacaccttggtatcgaaatgattttccaaactctgctggatggcggaaccaacccaaggattggtcttagacgtcttaggcttcttcggctgctcccccgacgcaatcttcatggcgacgatttcttcggtgctgcgtacagaaagaccttccgcaataatacgagaagccagcttgtccatttcctccggatcgctcaggcccaatagcgcacgcgcatgaccggacgatagcacaccggcagccactctcttttgcacagaagccggcaggttcagcagtcgcaaggtattggcgatttgcgggcgagacttggacaccgacttggacagttgtacttgtgtcaacccgaactcttcaatcatctgctggtaggcagccgcctcttccagcggattcaaggccacacggtgcaagttttccagcaatgcatcgcggagcatatcatcatccgcagtggttttgacgatggcgggaatcgtctccaacccagccaactgagaagcacgccaacggcgttcacccataatgagctcatacgggctgtccaaatgaccggcaaacggattcgtgctggattccgtctcgtcgtgcttggcggctttggccgcagcaatctggcttgccggacgcttgcgcacgactatcggttgcagcacaccaacttccttaatggaagcagacagctcattcaactcatcctcgtcgaagatggtacgaggctgatgtgcattgggcccgatatcagacagtttgagttcagccagataaccaccggctaccggcttgagctcgtccttcttatctgtgtcagcggtctttgccgccgatgcagtcaaagatgtttcacgtgaaacatctttgacagtgacggatgtacgatgtgccgtctgagacgcagacgacttgccgccctgctgaggtgcggcgaccttaccggtttgaggtttctccgtaccgaaaaacaggtcgctaggatgagtaatggtgtccaatgcgggcatggatgcgcgtttaccggcggctttcttgactgccttgctggacgatatcgtctgaggcacggcaggttttgattcctgctgggcagtagccttcttggcgggggttatgtcagcagtggcctccggagtagacgaatcctccgcaatcattgcgggctgctccgccaccggctcctcccctggcaatgtggggaacaaagcgccaaggcccttaccaagtcgtgattttgatgccattacttgttcctcctcgcatcaatggtgtcaaggacttgttgcgaacgctgtgcgatttccaaagctgcttcaccatacgatatggcacctatgccacgaggatcataggcaatcaccgattgggagaaactcggcgcttcggagatcttgactgaacgcgggatggtggtattcagcacaatgctgggatagtgtcccttaacctcgttatatacttcacggctcaataacgttcggcgatcgaacatcgtgacgagcatggtggacaccagcagtacgggattgaaatgctcttgcaccaaaccaatcgtgttaatcagctggccaagaccctccaatgcgtaatactcagcctggataggaatcagcatctcggtcactgcacacatggcgttgatgaccaagaggcccaagctgggcgggcaatcaatgaacacgtaatcatagtgtttatctgattgacgcaggtagaggtccaaggcctccttcaacaatgtgtttcggttgggcagatcagccacttccaactcggcaccgctgagatcgattgatgcaggcacaacatcaagtgtgggaaaatcaggacagaccgtgataacatcacccagctcggaacgcccctcgataacgtcatagaccgagggctctcccgatgcatgagatacacccaacgccgtagaggcattgccctgcgggtccatatcgatgaccaacacctgcgcgcccttgttcgccagcgccgcagcggtgtttaccgtggatgtggttttacccactccccccttctggttggccacggcaatacgacgggtacgttgaggtttggggaaatcggttttcttgagtacatcgtagcgtgagctttcatcagccatctggctgccaagcactgaaccgtgaccatcgaatattcgctgaagcgtttcggaagccgattctataggttccgactgatgatccttggtggacatcgctcctccttgcacagacgtaagttccagtgttctcattcgtatggacatgatgctcgttatccacaattgcgatatgcaatgtggataagtgtggataagtgtgaatgacgttgagtgttagattgtgtattcacagacgaaaaacattgaaaaatcaatgttttcatcattatgcacatcgtcccgtaaaaatgtggataacttttacgcacatatggaaatgtggataactcaatcagtactccactcatcgcttatccacaatcaccacgtgggtaggctcaagatccggcccgacagccgcctcaacgacacgtggacgacgaccaccgaattttgcaatctccttgccagccttgtcgatttcagcctgagcagaccgtcccttcagtgcgatcaactgtcctgacggtttcagcaacggcaacgtccagccagagagtttggtcataggagcaaccgcacgacacgtgacaacagcgaacggatgaatttcccgcttccgtacctgctggatgacggcatcggagcgtccacgaataatctcaacgttctgcagttgcatcaggccaacacattcatgcaaccattcgattcgccgctccatcggttcaatcagcgtgaagtcatgatccggcaaacacgcggcagccaccaatccaggaaaaccaccaccactgccgacgtcggcaactgttttgaagcgaataccattcgtcgcattccgaacgtacggcacaatcgcagcggaattcagaatatgccgttcccaaatgatatcgacgtcacgggggccgatcaatccacgaggttcaccctcttcggcaatcttggcatggaaacgctccaacttcggcaacgcatcacccaagacctcagcaagtacaggtgccccctgcagctgatccgtcatagccatctccctcaccatgtttcacgtgaaacaatcaacatggagaatggcgccgctcattacgacgccattctccatgcggtcactttagtttgttcaaagacgacatccgtcgaacgtccctgtcatctcaaaaaaactcgccgagcaattactcctgatcaagctcgtcgtcttcggcggtatcctcgactctattcttgagatacaccgtcacgtaacgatgaggctcctcaccgtgcgagcgagacttcagcccctcttcccgaaccacatcgtgaacgactttacgttcgaaggaattcatcggcttcaagtcatacggctcgccggaatccttcactgcgtcaatggcatccaaggcgatatcacggaggtgctgacgcttgcgcttcaggaaaccgtcgacatccacaatcagatgagaacgctcgccggtcttctgctgtacagccagacgagtcaattgctgcagagcatcaacgacttcaccattacggccaataagatgtttgatgtcagtatcgtcatcagcaacgatttgcacggtggggcggtcattacgcacgcccatctcaatgtcgccctcatagtcggcgatatccagtaggccttcaaggtaatccgcggcgatgtcagcctcttcgttgagctggtcgatcgacttcacgtcatcctgtgccatacgctactccttcatgtcgtgtttgaattccaagtctaagccctgctcccccgaacagagaaagtaatgtcggtgcgtgttgaatgtttcacgtgaaacatcgaactcgcaccgacatagtcgtcacttctttttgcgcttacgcacgggctgttgacgctgatagccctgagtggccttacgctcggcctcttccttggccttggccaatgcttcttcttccagagagggcaggccggcctttgcgcggcgagcattctcattacgatgatcgcgcttctccttgtccgccgcagccggagagccaggggtcgggaatgcgtacacctgccacaatgtgcggcagaggttgcacacgttgttggtcagccagtagaccagcacggcgaacggcatggcgacaccggagaagatgtacatcaccgggaagagccacagcatagccttctgcatggtctcggtctgcttgttcatcgaagcagctgccatgttgcgcttcatgctgaagtactgcataaaccacaggcagaaacacatcaggaacacgaagataccgatgaccgccttgccactagcggcagcactggtgaagttatcggtcacgctgacaatgccgaacacatcggtttgggtgaattgcttggcggttgctacgtcgaacgcgcccaacgcatcgcgtttaccgttggcaatgtatggaatggccgacagcgtatagaacatggacatgaacaccgggccctgaatgagcataggcaagcaggagccagccggattgacgtcattgtcttgatacagtttcatggtttcacggctcatggcctccctggaagcctgatccgtcttgcctttgtacttgttctgaatacgctgcatcttcggcgccaatgcctgcatcttgcgcatcgacttcatctgcttgtagaacagcgggaagatacaagcctgcaccaccagcaccaggatgataatggcaagcacccatgagacaccaatcgggctcacgcccagcatcacgaagaagtcatgcacgatcttcatgatccaggtctgcaaccactcaacgggagtcaggattttatatagaaatccccaaaacccgctatcaagcagaaattcatttgagttcatcgttgggcctctctttgggttgtggccaatggtgtcagtcgaggctcttcatgagccttcgaccacgaaaacctgtaaaaaacggaataccgttgtggaacatcgtcgattcccccacgactccacggccggcaacgcagtaatctcagcacggcgagcactccccctttgaacgcgccataccgttccaatgcctcaatggcataattcgagcacgttggataatacttgcaacaaggcggtgtgtttgccgagatgtgctgttgataccagcgcaccccaccaatcatcaccgccttgaaagaagctgtcatgcctcagccaccttatgcgccaccgtggcaaaagccttcgcgatctgctgatctagcgaagcgaacgatgcggtcgctgcactgggcttggcgcgcaaaacgatatcgcaatgcgcgggcagcagatcctcatgggctctggccaatacacgaaacctacgcttcaccgtattacgggtgaccgcatgtcctaccgatttggagacagctaatcccaaacggcgatgcaccgtccggtcgtcatcatcatgatggtcgtcgggcaccaaatagtgcacgacgatatccttgccacctgctttgcgccggcgtttcagcacggtgacgaaatcacgatggctttgaagcctctccacctcgactatgcctgtggcactgatcggaatgatcaggcggagagggtcttgcggcccttggcacggcgacggttgatcaccgcacggccagaacgggtgcgcatgcgcaggcggaagccgtgcttcatgtggcgacgacggttgttcggctggaacgtcctcttcataatccattgctcctaggtctattcggcaacgcttcgcgctgccctcacgtgagtcaagctataccaaagtactctcacccctaccctcaagtcaaaacggacggagtattttcacatttcgacacgttgcgagacacgccccaaatctcttataatcggcggaataccaaccattcacggccaaaagttatccacaaattacatgtttgttattcacaatccagttatttcaacacgcgacacggtggataacttgtctaaaccagagtaaatattatctgttgtacgtatttcgccacagcgacagaaggggccacc

SEQ ID NO: 26 - DNA, 10217 bp, Bifidobacterium longum
  source 1..10217: mol_type = genomic DNA
tacaggaacaaagttactggtgctgggccgcgacatcgaaaagcgtatccgtatatctgggaggcagcaattcttcccaatgccagtatgtgaaatgggggaagaactcgtcttcttgcgccaatgtaaccggagatttatcgactgacgtgaggcgcgccttgtcaagtgcgggcatccgcaacacaggttcgatgataaatagtgccgcaagcactgcaaccatcagcgggcaaattaacaatagcaaaccgttgatggtacgttggggctgggatagcggcggtggccatatgcttgtgataaggggatatacctctgatccgggctatcttgttgtctcttacatcgatccgttgcagtcgtattacagcagtggaacttacgactggatgaaaagcggaagtggtcatacatggacgcacacacgatatggctttagccgataaagggggaacaaatgagtacattctataatgttcgtaaatccctgattcaggcgttccgtatattattcgcggcgatgttatttgtcgttgctataggaacggtctgccctgatatcgctcgcgcggagaatctgcccgagagcacgcaaatcaacgagttcgctcaaagcgacgaggcgaggacccaaacgctggcgcttatggaagctgtccagaacgacggaagccctgaagcatccacgcagattgcaataggttatgccgataaagtgcattatctacgctatgacgattcaggtgccataacgaacacaatcacggacccgcaggattacgactgggtggcacccgttgaggttgaaggtagattagtgggaaggatcacgatctgggacaacaacggaagtctggaagtggggaatttttctcccgatatagaagaggcgtccctgctcgatgatgatgacagcaccactctcatcagcgatggcttctcccgtgcgtattattcgatggaaaacagcagaatctcacctctcaacgaagctgcacgcgctattgtccccgagtctgtacaagtggagcagggagacatcgcgatccgtaagaacgcgccatctgggtttgacgattcagccggcggcggatctatcggcgtcgtgtcttccgacaccgcaatgggcacggattcttccatgaacatattcatgttgatggctgtgttcattgtcgtgacagcagttctcgcccttatgtgcaggattctgtggcgcggtccgaaccggcggaacgatcgatgaggaagagacaaccattgttttccggcctgtgtctggcggtatttgcgctcatgtcgggttgtaccggagcaccggttcaaagcgacgatgccggcgctcatctcgaatttcgcgcctatgcggagtcggggaccgtcaggattgagtcgcagagcgagacggttctcgaaacccgaatcaaaggggactggttgaaagtcgctccggacgattggcttgagaacgacaggccgctcaccttcacggttgaacgtgattccggcggagtggaagacaacgtctcctgcgaaatcatattcagtggccacacgattgacgaacgacgagtcaccggccccgaaacatcggccacatgccagtatgacacatggcgggatgcgattgactactgaaaatattcttagctgaaagcccgtccgggcgtggaagctcggacgggccgtggtgccgttattggcggctgtgtgcgctgatcgcgtatgccgtgagtgacagcaccgcgatgtcggccgcgatgggatgcatcgcgggagcgaggctgatgacgatgaccgccatcagccagaccacgaggccgccgcgcggccccttttctggtttgcgcatggcgcaatcctttcagtaagccgcgccgcgactggcgcggcagcgtcgtccggcggttgccggacggtcgttctggtccctgcaacaagaccttctcgacatgaacgatggtatcggctaacatggaagtgccggttcgaggcactgcaaacttcctcccattccaaggcggtgcgcaacgacttcttcgggaggatggccgagaccggtgggtggccctgattccaccccctttcagtaagcgttgggccggtgtcttcgggcaccggccctttgcgttgcccgcgttcgggcacgcgcctgtccgggacgtcgatgtctgttctaggattctgcggctattcgtgcagcattctcgctatggcttggttgatggtctcgcccattttcatgccgttgtccgcgcagtatcgtttgagttcggctttgaggtccgcgtccatctggaacgtggtcatgaccttgcggacggtttcgccgtcgccgcggccggtgtcgtcctgcacgtccatgagcttggtcacgggttttccttcgagttctcggcgtggctgcatgctcatggtgagtcgtcccgaggccttcttcatcgcagttcccctctcagttcgttccacacgtcctcgtatccgttgaggttgcttctgaatgtgtggccgaaatcggccttgaagtcctcacgcagcgggatctccgtgtcgaagatgccggccccgtattcctcgacggcggtcctgaacgcgcgcagggcgttggtgcccttgcgggccatgacgatgagcacggcgtagtccttgccggcgtcctggcattgggcggcggtgagcatggtctgctgcaggtcgatgggcgaggacagggtggggatgaccacgaagtcggcggtcttgatggcctcgtccacgacggcgccgttcggcggggtgtcgatgacgatcagttcgccgtcgcggtccgggcggcgttcgcgcatgcgccgtatctcggcctggttcttcgacacgacggggaaggggagcgggtcgtccgcgtcctcggcggcctgtgcccacaatgtggcgctgccttgcgggtcggtgtccacgaccgtcacgctcagtccggatctttgggccgcggtggctatcgccagcgagctggtggtcttgccgaccccgcccttgatgttggtcacgccgatgatcatcctgcctcccggaatatttaaatatttatttttatttatttattgtagcatggccgatggtcttcgccccagggtcagatgcgggccccgtagcctgcgccgtggcccgcgcccgccgaccatgtcggcgtcgcttggaaggggtctgcatcatacgagatcgaggggtgggagtcgtagccgagcaggtattcggtctcgcgttcgcggagcatggcggtgtagtcgacccatccgggtcggtggccgagggcccgttcgagttcggccaggtcgttcgtgatctgctcgccgcgcggggcgtcctgccatgcctggtcgatggcggttctgtcgtgttcgcgcacttcgaggctcttcctgagcttccgggtcgcctggtcgatctggcgtggggtcatggtgcggagctggtcccggtccaggcgttggtaggcggcggtctcgaccagggtgccgagcacggcgtcgtcgcggtatcgtatgtcctccggttccttgaagtacggttcgaattcgccgttgtagttgaactggtcgttccgcagcaccggcatggcccatccgccccagttcggatgttcctcccggaatccggtcagctcgttccagaacccgcggccccaaccctcttcgagccggccgaggacggagttgtactcatcgatcgcgtcgggtctgcgcatgtcgcgcaacgcggccaggcgcgcccggtcgcccagggtctccgcctgccgtatgtccgccatgctccggcggtccgcgttggtccgtaggacctcctcgtattcgttgccgagctcttggacacgggcgcgcagacgctccggcgcactgatctccggatcacgttcccgctcgtgttcgaggtcacgcatccgatcgcgcagatcggtcacggccggcgtctcctccgccttggcccgggctgaggcgatgcggagctcatgattgctccggtattcgccgtagccgatgtgccaccggtcctcgaactccgcccgtgcggcctggtatcgcatcagcgactggttcgcgcgttcggtggcctctccggccagtcggcgtcggcccatcacgaagctcctgtatcccggttcgttccggtcggtcaggcggagcctttcggtctcgtcctcgtgatgacgttccagcagccggtgcacgtcccgccagtcgtccgccatgtcccgttcaagccttgcggtctcggcgtcaagcgccgcgccgcatttgtcggatagttcgcgcaggcggtcccggtaatcgtccgcgacgtgttcggcccggctccgcgccgtatcgtactgatcccgcatgtcgcggatgcgttcggacagttcgccggcgcgacgctgctcccgttcaatctccgcatggagctccggcaacggctccgaagcccatacccttcgatcggcgccctgcagaaggccggtcttccgttcttgcagccatcggtcgaggtcacgcagttcggacgactcctcggcgttcaggccggcgtcgacgggttcggccatctgctcgatctgctcgcggagattgttctcggcggcttcgagccccttgtctcccttgtccctggcgatgatgcgggtcagggtgtcgagggcgtcctcgtcgccgcccgcggtcatgaacacctggttgccggtcttaccgcgggtcagggccacataggcgtcggcaccggacgcgccctcggcggcgtagaagatcgcgtgcccgctcgtgacgccctgggcgccgtaggtggtgctcgcgtatcctagctgcacggcctcggccacgtattcggcggggagcctgtaggtgcgtttcccgtccccgacgagcatccccgaccgttcgtcgatcccgagcacggcgaacgtctgccggttcgccacgcctatatggttgtcgttcctgcgggtcatgacgatgtcgcccacatggatctcctggccgtcgatcatggaggcgcaacgctcgtcgcccaactggccggcgtcgagcctcaaccgttggatcgcccggttgacctcggcggcctgccggttcgtgacggtgctgatcgtggtgtccgggtgctccatccacgcggcggctatcgcgttcacggtcgcctcgtcgctgtcccaatgccggaccatgccgcgatcgaacagttcgccggccaaccgttcggcgttggcgggcgtccgttcgcgcagacggatggtgtaggccgcgtagtcggggtccttgaaccggtgcacgtcgcgcatggccaccacgttgcccgtgtaccgttcggccagttgcatgacgccgccgcggcccacggcattcagttgcatggtgtcgcccaccagcgtcagtctcgccccggtctcgtcggccacgcgcagcagcgcaagcgcctggtcctggtccatcatgccggcctcgtccacgaccaggaacgtgtcacggtccagccggtactcgtcgggcacgccccggtaggtgttgccgcgatggtcggactgcccctcggccacgcgataccaggggtgttcgggatcggtctcgtcgttccgccagccgtatgcctccagcagacgcatcagggtccccgtcccggtgccgacctcctcgcccgcgaccagcgccgccttctgggtcggcgtggcgatgaccagccgtttgccgttctcccggcaatagtcgttgaccgcgttgagcatgtgggtcttgcccgcgccggccgcgccctcgaccacggcgaggggatcgcccttgcagatcgtttcgacggcctcgcgttgtccggcgtccagcgtgtaccgttccgcgagatcgtccagacgcgggttcgcggtctcctcgacgccgcgggcggccagacggcccttgagctcgtcctcgcactcgaccacggcccggcacgtcagcgacttcacccaaccggccctcgcccgcgggtcctcgctcagcatgacgcacagttcccgggcccggtcgcgtatcccctcggccagggctttcagctcgtcgcgcgttcccgtcgccccggtcaggcgcacctggtcgtaggcggcgacctccagctgttccaggctccacgcgctgttcgtctcccgcaacgcggcgatggccgccacggcgcaccgccgcaccgcgtcggcaccgaacccgacggcccgtggccgcggatccgccgccgcgccgtcgagcatggcggggatgtcgtagccagcggcgcgcagctcctcgttccacgccccgtagtccacgcgcgtgttccaccgccccttggcctgcctcgtgtcggcccatgcctggaggcgcagacgcatcagggtccgctcgtcgggctccgccaccgtcccgtagccgaccatgcccacgacatcgccggtccccggatcacgcacccggcgcatgccgtccgcatgcgcggccctccactcgtccaccagctcggccatacgcgcattgatcgcgtcccggcgtttgctgaacacgtccgaagcgttcccgagctccggcacacgcccctgcatgtccagcgtcatgccgtgcgcggccatcgcgtcgcacaggccggcgtccccgtacaccgtggtctcgtacacggaacggatgttctcgtacatgccgaacagtcggctgctgtcgatgctgtaccattcatcgccgacccgcacccggttgatcagctccaggtggcggtgcagctcagggtcgccggcacggctggtgaaatgggtcgcggacacgaacatcacctcgtccggccgcacccaccgccgcctgccgtccccgcagcgcagacgcaccgtcagccgttcggccaggaacctcctgaccgcctcctcgccacgcgcctgggccttcatgcgggcctcgcgcacgtccccgtacacgaccgacgccacgtccagatccttgctgtcgttcaaagggatctcataggcgcgcacgttcccagcacgaaacgacttcaacagctccccgctgtccgggtcgcgcccgtccagcagcatctccaaaccgccgtcacgcaaccgcttcgaagaacatttcgtgccatccgcgtaacgatggaagcgcagaccgtcagaatgctcgccaaggtacgcttcgaggccctgtccggcctgattgcagcctttcaggtactcctccagggaacgccccccggtggtgaccttgacgatatgcccacgcatgacaccaattctaccccgtcgccacgttagataccggcttgcccacgcagtgggcataagtactttgctattgattaatgattggagttttgtgggtgaggtatcgggtcggatgatgctgctggaatatggtgggtcgtatggatatgcgtattggggttggtgatggcgtgggggatacgggcggttgatgtgtgatcatgcggtggatcggctggcggatggatagaattggatacgcatcgggcattgcatatggaaaggacgcataccaatggatgacgcgatgtacgacatgcagaccggctcgcaggacgacggcgcggggcacgagcccgtgaagcgcaaaccggtccgcccggccgagctgcgcctggacgactccaaggagaacctcggcctcgaacgggtcgattacggctacctctccccatacctcgaaacccaggagacacccgcggacagggtcgcgcgccggctgatagccaccccgtcgatgcacagccacagggacaacccccaatggtggagcctcccggtcggccacatcggcaggatcaaggcgcagaagaccgccgcacgatgggccagggcacgcacgctcgacggcagaacggtcaaattctccgccgtcgcgttcccgatccgtgacagcgacaagaacctctggggcgtcgccatcagctacgaccccgccgaccaaccggccaccgaaccgcacgagccgacagccgatcaccccacgttcgacaccggacattgaccgggagtacgggcgggcactgcaaggggatgcgtctggcggacgtgtccccttgcccggctagccgagggcacatacctacctaaagcccttgacttgcttagggtcgcctcatgatcctcaacgtatcctcgaccaacagagtagccgccgcgatgtagatcgcccatcgccagtggacgccgataccgactagcgcggacgtacgttcgataaggttccaaaacggcgcaatcatttccatgacggcgtctatgcagatagcaaagttccgttgaaattccaacgatttaacagtgcgttccgtatatctagaaccgccgctcaatcctattcctgcaaggactggggtcacagcgcgtacctaaagcccctcgaatggtggctaaagcccacgacgcatgacggaaacctacctaaagccctcagatggccgaaacgtctcacggtggctaaagcccacgtgagttatccacatccggcagaggtcctttcaaaattcgctctctaagtatctgtatatctgtatatctgggacccccgctcagccctactgccacaagggctaaggacacattgcggtggctaaagcccctcaaatggtggctaaagcccctcaaatggtggctaaagcccctcgcggtggctaaagtacacgctcattggtggctaaagtacacgcagttatccaccgaacgtacctaaagtacacgcatgccggtggctaaagtacacacctgccctgctagcatggtggttaaagtacacaccgaaatttggtataaaaatgcccccgcgaggctggcacctccgaaggcatggcaaccacgttaactaggagcgtgattagcaatggtcgatgatacccgttccggggaactgactctcccggaggacgaaccgtggatgtcacacggcttcatttccaagatcgccgcgcaggtctccctgccctacaggaggcccaaggacaacgccagagagatagtccggcgtaatggcaatctggtggtccggttcatcagtggcgaggattgtctgccttacggtaagtatccgcgcctattcgagctgtgggcgtgcacgatgatcaagacgaataacccgtgcttcgacccggaaacgaacgtattacatctgggcaccacgttccgcgagttcctgcgcatgattgacgtgcaggtcggcggacggcagcttaaatccatcaaaccccaactggagcgtttgttcgcctgttcctaccacatctccaacaacaccgagaacgagacgaacatgcgcaacttcgtcgtcgccgagaaatcacgcatcgattggctgcggaatgaaccgcagtcccacggcctgttcgagaactgggtgcagctgagccaaggctacgtggatatgctgcgcgaccatccggtgccggtcgacctcaaggtgatagccaggctccgcaaaccgatggcgatcgacgtgtactggtggctgaccaagcgcgtctacaacctgcacgagccggtcacgatcgcatggcagcagctctaccagcagttcggcagcgactcagagctgaaggagtttaagcggaagttcaagcttgctgtggccgaggtcgtggaggtgtacccgtgcaggctcacgttggggccgcagcgggtgacggtgttcccgaaccggacgagcgtgcccacggtgacgcagacgcgggccatcgaacgcagccgtgaggacgacaccaagcggagcgagagggagcggaggaacgccgaacgcgccgaggaacggcgtgcgagggcagagtcccgtgccgaggagcaacggcagcgcgaggagatccagcggcgggtgtccgaggaacgcaagcggcatggcggcagcatgttcgccggctccgccggctatgtggaaggggaaccggatgagacaggggcagaggatgacgtctggcatgatcccgacgagatgacgctgttctgactggaggtattcatgaattattgctctggcgtataaaaaagcaaattcaaacgaagaaaccggcatacggccattagccgttctatacttaaagagacggcgaatccaacgagggcttcgcgtcagagaaaggggaaattccgatgaaaccgcgacggcggcgtatcgccgcaatggtaactagtttagcagcagcgctggttatgtcactctcatgcgtgacgactgcatccgcatcttctgtatatctttctgtgccaatttacg
